(19) United States
(12) Patent Application Publication
(10) Pub. No.: US 2015/0252412 A1
(43) Pub. Date: Sep. 10, 2015

(54) HIGH-DEFINITION DNA IN SITU HYBRIDIZATION (HD-FISH) COMPOSITIONS AND METHODS

(71) Applicant: Massachusetts Institute of Technology, Cambridge, MA (US)

(72) Inventors: Alexander Van Oudenaarden, CT Utrecht (NL); Nicola Crosetto, Solna (SE); Marzena Magda Bienko, Solna (SE); Leonid Teytelman, Cambridge, MA (US)

(73) Assignee: Massachusetts Institute of Technology, Cambridge, MA (US)

(21) Appl. No.: 14/424,766

(22) PCT Filed: Aug. 30, 2013
(86) PCT No.: PCT/US13/57722

§ 371 Date: Feb. 27, 2015

Related U.S. Application Data
(60) Provisional application No. 61/696,096, filed on Aug. 31, 2012.

(51) Int. Cl. C12Q 1/68

(52) U.S. Cl. CPC C12Q 1/6841

(57) ABSTRACT

The invention provides methods and compositions relating to high definition fluorescence DNA in situ hybridization (HD-FISH). The probes generated using the methods of the invention demonstrate higher resolution and efficacy than conventional DNA FISH probes.

### RELATED APPLICATIONS

[0001] This application claims the benefit of U.S. Provisional Application No. 61/696,096, filed Aug. 31, 2012, the entire contents of which are incorporated by reference herein.

### FEDERALLY SPONSORED RESEARCH

[0002] This invention was made with government support under Grant No. DP1 OD003936 awarded by the National Institutes of Health. The government has certain rights in this invention.

### BACKGROUND OF INVENTION

[0003] The tremendous advancement of DNA fluorescent in situ hybridization (FISH) techniques during the past twenty years has revolutionized multiple areas of biomedicine, including prenatal screening¹ and onco-hematological diagnostics². In biology, the combination of DNA FISH with fixation procedures capable of maintaining the three-dimensional architecture of the nucleus has paved the way for studies exploring the spatial organization and dynamics of chromatin³⁻⁵. Nonetheless, DNA FISH remains limited by several important factors, including poor resolution (typically, probes cover regions of several hundred kilobases (kb), yielding patchy signals), low number and high cost of commercially available probes, as well as high cost and time required to synthesize custom-made probes. Finally, the signals produced by such probes are usually poorly amenable to automated image processing.

### SUMMARY OF INVENTION

[0004] The invention is aimed at improving resolution and processing of DNA FISH signals. Some aspects of the invention provide streamlined and cost-effective approaches to the preparation of probes. The invention allows an end-user to fully exploit the enormous potential of DNA FISH for both medical diagnostics and research.

[0005] In accordance with some aspects of the invention, the inventors have compiled, inter alia, a genome-wide database of optimally designed primer pairs for fast and cost-effective PCR-based synthesis of highly specific, single- or double-stranded DNA FISH probes, targeting each gene in the human genome plus thousands of inter-genic regions. These probes allow the visualization of as little as 3 kb, producing signals that are robustly quantifiable by image-processing software. The invention represents an improvement over existing DNA FISH methods for one or more of the following reasons: 1) the synthesis of probes is highly streamlined and cost-effective; 2) the resolution achieved using these probes is higher than typically achievable with commercially available probes; 3) the signal produced is amenable to robust and automated computational processing in a large number of cells; and 4) strand-specific probes can be produced. The probes identified, and optionally generated, using the methods of the invention can be used in a broad range of applications, including medical diagnostics, chromatin architecture studies, and analysis of combed DNA.

[0006] Thus, in one aspect, the invention provides a method comprising (a) identifying a plurality of nucleic acids, each having a nucleotide sequence that is unique relative to sequenced genomic DNA of a species; (b) identifying for each of the unique nucleic acids identified in (a) the following: (i) amplification primer pairs that generate nucleic acid fragments that are about 70 to about 300 base pairs (bp) in length, and (ii) the nucleic acid fragments that are generated through amplification with such identified primer pairs, thereby creating a putative primer set and a putative probe set; (c) eliminating (or excluding), from the putative probe set, nucleic acid fragments having amplification primer pairs that amplify more than one nucleic acid fragment or that amplify a single incorrect nucleic acid fragment from a nucleic acid sample (and accordingly optionally eliminating, from the putative primer set, primer pairs that amplify more than one nucleic acid fragment or that amplify a single incorrect fragment from the nucleic acid sample); and (d) eliminating (or excluding), from the putative probe set, nucleic acid fragments that hybridize to multiple regions in the genomic DNA of the species or that do not hybridize faithfully to their own region (and accordingly optionally eliminating, from the putative primer set, primer pairs that amplify such eliminated fragments. The method therefore yields either or both a fluorescence in situ hybridization (FISH) probe set and a FISH primer set. The probe set may be referred to herein as a high-definition FISH (HD-FISH) probe set, intending that at a minimum it can provide a high degree of resolution when used in FISH. Similarly, the primer set may be referred to herein as a HD-FISH primer set. As used herein, a primer set may be referred to as a probe primer set.

[0007] In some embodiments, step (c) is performed before step (d). In some embodiments, step (d) is performed before step (c).

[0008] In another aspect, the invention provides a method that comprises step (a) followed by step (d). In this aspect, the probes may have a length of 30-300 base pairs (or bases, if single stranded).

[0009] In some embodiments of these aspects, step (a) of the method is performed by analyzing a plurality of overlapping nucleic acid sequences along a contiguous genomic region such as a chromosome. In some embodiments, each of the overlapping nucleic acid sequences is about 500 bases in length. The extent of overlap between neighboring sequences may be about 400 bases.

[0010] In some embodiments of these aspects, the species is human.

[0011] One or more of the steps of the methods may be performed and/or the determinations associated with these steps may be made using in silico techniques (e.g., computer algorithms or simulations). In some embodiments, step (a) is performed in silico. In some embodiments, step (b) is performed in silico. In some embodiments, step (c) is performed in silico. In some embodiments, step (d) is performed in silico. In some embodiments, steps (a) through (d) are performed in silico. Computer programs that may be used include BLAT (e.g., for steps (a) and (d), Primer3 for step (b), and e-PCR for step (c), all of which are publicly available.

[0012] In some embodiments, step (a) excludes nucleic acids that have 80% or higher similarity to other sequences in the genome of a species. In some embodiments, step (d) excludes nucleic acids that have 70% or higher similarity to other sequences in the genome of a species. In this manner, step (d) can be thought of as being more stringent than step (a).

[0013] In some embodiments, the set of nucleic acid fragments identified in step (b), and therefore also the ultimate HD-FISH probe set, comprises fragments or probes that are about 30-300 bases in length. In some embodiments, the set of nucleic acid fragments identified comprises fragments or probes that are 70-300 bases in length. In some embodiments, either set is comprised of fragments or probes that are similar in length (e.g., +/−10 bases in length). In some embodiments, the fragments or probes may have an average length of about 30 bases (e.g., 30+/−5 bases), about 35 bases (e.g., 35+/−5 bases), about 40 bases (e.g., 40+/−10 bases), about 50 bases (e.g., 50+/−10 bases), about 60 bases (e.g., 60+/−10 bases), about 70 bases (e.g., 70+/−10 bases), about 90 bases (e.g., 90+/−10 bases), about 110 bases (e.g., 110+/−10 bases), about 130 bases (e.g., 130+/−10 bases), about 150 bases (e.g., 150+/−10 bases), about 170 bases (e.g., 170+/−10 bases), about 190 bases (e.g., 190+/−10 bases), about 210 bases (e.g., 210+/−10 bases), etc.

[0014] In some embodiments, the HD-FISH probe set comprises one or more subsets of 50 or more probes that bind to single 100 kb regions of sequenced human genomic DNA (i.e., the probe set contains 50 or more probes that bind within the same 100 kb region in the genome of the species). The probes may be 30-300 bases in length, including 40-300 bases in length and 70-300 bases in length. It is to be understood that each probe binds only to the targeted 100 kb region.

[0015] In some embodiments, the HD-FISH probe set comprises multiple subsets of 50 or more probes that, in aggregate, bind to 93% of 100 kb regions of the sequenced human genomic DNA (i.e., the probe set contains a number of probe subsets, each of which comprises at least 50 probes, which when used together bind to 93% of 100 kb regions of human genomic DNA that has been sequenced).

[0016] In some embodiments, the method further comprises synthesizing one or more subsets of probes within the HD-FISH probe set using an amplification reaction such as but not limited to a polymerase chain reaction (PCR).

[0017] In some embodiments, the method further comprises identifying the amplification primer pairs for each of the nucleic acid probes in the HD-FISH probe set.

[0018] In another aspect, the invention provides a composition comprising a probe set produced using any of the foregoing methods.

[0019] In another aspect, the invention provides a composition comprising one or more PCR-generated FISH probe sets each comprising 50 or more probes that bind within a contiguous 100 kb region of sequenced human genomic DNA.

[0020] In another aspect, the invention provides a composition comprising multiple PCR-generated FISH probe subsets, each comprising 50 or more probes, that in aggregate hybridize to 93% of discrete 100 kb regions of sequenced human genomic DNA.

[0021] In some embodiments, the probes are about 30-300 bases in length, 40-300 bases in length, or 70-300 bases in length. In some embodiments, the probes are relatively uniform in length (e.g., an average length +/−10 bases).

[0022] In some embodiments, the probes are fluorescently labeled. The probes may be uniformly labeled based on position of label and/or number of labels within the probe.

[0023] In some embodiments, the one or more probe subsets are produced using amplification reaction such as but not limited to a polymerase chain reaction on genomic DNA in the presence of an amplification primer probe set such as an HD-FISH probe primer set. In some embodiments, the one or more probe subsets are directly synthesized (e.g., using automated oligonucleotide synthesis independent of an enzyme-mediated reaction). In some embodiments, the probes may be uniformly fluorescently labeled during or after synthesis. In some embodiments, the probes may be fluorescently labeled at their 5′ ends (i.e., end-labeled at the 5′ end).

[0024] In some embodiments, the probes are single-stranded. In some embodiments, the probes are double-stranded.

[0025] In another aspect, the invention provides a composition comprising an HD-FISH probe primer set produced using any of the foregoing methods.

[0026] In another aspect, the invention provides a composition comprising an HD-FISH probe primer set that generates, through an amplification reaction, an HD-FISH probe set comprising one or more primer subsets, each having 50 or more probes, that together hybridize to 93% of discrete 100 kb regions of sequenced human genomic DNA.

[0027] In some aspects, primers within the primer set are fluorescently labeled (e.g., 5′ end-labeled).

[0028] In still another aspect, the invention provides a method comprising performing a fluorescent in situ hybridization (FISH) reaction in the presence of an HD-FISH probe set, or a subset thereof, that hybridizes to a 100 kb region of interest, wherein the probes are about 30 to about 300 bases in length (e.g., 40-300 bases in length or 70-300 bases in length) and wherein a FISH result that differs from a control indicates presence or absence of a chromosomal target such as a chromosomal abnormality.

[0029] In still another aspect, the invention provides a method comprising performing a fluorescent in situ hybridization (FISH) reaction in the presence of an HD-FISH probe set, or a subset thereof, that hybridizes to a 10 kb region of interest, wherein the probes are about 70 to about 300 bases in length, and wherein a FISH result that differs from a control indicates presence or absence of a chromosomal target such as a chromosomal abnormality.

[0030] In another aspect, the invention provides a method comprising performing a fluorescent in situ hybridization (FISH) reaction in the presence of an HD-FISH probe set, or a subset thereof, that hybridizes to a 3 kb region of interest, wherein the probes are about 70 to about 300 bases in length, and wherein a FISH result that differs from a control indicates presence or absence of a chromosomal target such as a chromosomal abnormality.

[0031] In some embodiments, the HD-FISH probe set or subset thereof comprises 5-30 probes. In some embodiments, the HD-FISH probe set or subset thereof comprises 10 probes. In some embodiments, the method further comprises synthesizing the HD-FISH probe set or a subset thereof using an amplification method such as PCR.

[0032] In some embodiments of the foregoing methods, the method is performed in more than 50% formamide (v/v), more than 60% formamide (v/v), or more than 70% formamide (v/v). In some embodiments, the method is performed in about 60-75% formamide, or about 60-70% formamide, or about 65-70% formamide. In some embodiments, the method is performed in the presence of SSC, dextran sulphate, phosphate buffer, EDTA and Denhardt's solution. In some embodiments, the method is performed in one or more of the following: 68% (v/v) formamide, 1.7×SSC, 10% dextran sulphate, 50 mM Na2HPO4/NaH2PO4, 1 mM EDTA, and 5×Denhardt's solution.

[0033] These and other aspects and embodiments of the invention will be described in greater detail herein.

### BRIEF DESCRIPTION OF DRAWINGS

[0034] FIG. 1 is a schematic illustrating the probe synthesis and labeling methods of the invention. (A) illustrates a ULS approach to labeling. (B) illustrates a 5′ end labeling via PCR followed by single-stranded probe preparation using biotinylated reverse primers incorporated during the PCR step.

[0035] FIG. 2 provides comparisons between labeling with commercially available HER2 probes and the probes of the invention. (A) shows images of interphase nucleic hybridized to a commercial HER2 probe that spans 450 kb of genomic DNA (left panel), and the HD-FISH dsDNA HER2 probes of the invention that span 40 kb (middle panel) and 3 kb (right panel) of genomic DNA. The commercial probe provides two strong signals which would be interpreted as the presence of two copies of the HER2 locus, while the HD-FISH probes of the invention provide four distinct signals (middle and right panels) suggesting that the HER2 locus has been duplicated. (B) shows the frequency distribution of dot widths when a probe set is used that consists of only 10 200-bp probes that bind within a 3 kb region of the genome. As shown, the majority of the dot widths observed are greater than the diffraction limit of the detection system.

[0036] FIG. 3 provides images of interphase nuclei hybridized to identically fluorescently labeled HD-FISH probes of the invention that target 10 loci on chromosome 17. The loci are separated from each other by at least about 8 megabases (Mb). The images show the presence of two or more clusters of signals within each interphase nucleus, with each cluster comprised of multiple distinct signals.

### DETAILED DESCRIPTION OF INVENTION

[0037] The invention provides, inter alia, methods for identifying and generating a FISH probe set and methods of using a FISH probe set of varying lengths. The probe sets of the invention are generated, in some instances, using an amplification method such as PCR. The invention therefore also provides a method for identifying optimal amplification primer pairs to be used to generate a probe set of interest. The invention also provides probe sets for use in the detection of virtually any nucleic acid region of interest, as well as amplification primer pairs for use in the generation of the probes of interest.

[0038] As described in greater detail herein, the probe set is generated by analyzing genomic DNA of a species. The analysis requires the sequence of the genomic DNA. As a result of various next-generation sequencing technologies, the genomic DNA sequences of many species are now available. The analysis may be performed to identify HD-FISH probes for an entire genome, or it may be performed to identify HD-FISH probes for a region of interest that is less than the entire genome. Such regions may be entire chromosomes or regions of chromosomes including an arm of a chromosome, or even specific genes within a chromosome (or genome). The region being targeted by the probes may be referred to herein as the region of interest.

[0039] The methods provided herein identify probes of any length (or size, as the terms are used interchangeably herein). Typically, shorter length probes are preferable since they are able to yield higher resolution and thus more detailed analysis of genomic alterations such as deletions, amplifications, translocations, and the like. As an example, a probe that is 100 kb or more in length may not be useful in detecting some genomic alterations because it binds to such a long region (i.e., mutations within that region may be overlooked provided the probe has sufficient complementarity to its binding site in its entirety).

[0040] In some embodiments, the probes range in length from about 30 bases to about 300 bases, including 40-300 bases and 70-300 bases. It is to be understood that the methods of the invention can be used to generate probes of any desired length. The probe length may be, without limitation, about 30, about 40, about 50, about 60, about 70, about 80, about 90, about 100, about 110, about 120, about 130, about 140, about 150, about 160, about 170, about 180, about 190, about 200, about 210, about 220, about 230, about 240, about 250, about 260, about 270, about 280, about 290, or about 300 bases.

[0041] It is to be understood that the probes of the invention may be provided as double-stranded nucleic acids (particularly when they are synthesized by an amplification reaction such as PCR) or as single-stranded nucleic acids (particularly when they are synthesized directly using for example automated synthesis techniques or as they may be rendered just prior to or during a FISH assay). As a result, the probe length may be referred to in terms of base pairs (bp) or simply as bases.

[0042] The methods can be used to generate probe sets comprising probes of relatively uniform length. Such probes may therefore differ in length from each other by about 40, or about 30 or about 20, or about 10, or about 5 bases. As an example, a probe set may comprise probes that are 210+/−10 bases in length (or in other words, may have a length range of 200-220 bases).

[0043] The methods can also be used to generate probe sets comprising probes that are relatively uniform in their binding affinity to their targets. This is important in a FISH assay because all the probes will be expected to bind to their targets under the same hybridization conditions with the same affinity. If one or more probes are better able to bind to their targets than others, then the results and existing mutations may be obscured resulting in false negatives or false positives.

[0044] Thus, the methods of the invention can be used to generate an optimal probe set having relatively uniform length and relatively uniform binding affinity under certain hybridization conditions. The invention provides particular hybridization conditions that were used to perform FISH assays using probes of various lengths, including 200-mers, 100-mers, and 40-mers.

[0045] The Examples demonstrate the use of the methods and compositions of the invention in a robust HD-FISH assay. These findings were further confirmed as evidenced by Bienko et al. Nature Methods 2013 February; 10(2):122-4, the entire contents of which are incorporated by reference herein.

[0046] The methods to produce an HD-FISH probe set are typically multi-step processes. Below is a description of one such process.

[0047] In step (a), a plurality of nucleic acids is identified, each having a nucleotide sequence that is unique relative to the sequenced genomic DNA of a species. This step is aimed at identifying the maximum number of sequences having a certain degree of uniqueness in a region of interest. The region of interest may be the entire genome or a region within that genome including a specific gene. “Sequences” in this context is used synonymously with the nucleic acids being identified. “Unique” in the context of at least this step means at a minimum that the sequence has no other exact match (i.e., 100% identity) in the entire sequenced genome of the species. In addition, it also means that the sequence does not share more than a certain degree of identity with any other sequence in the entire sequenced genome of the species. The cut-off for this initial degree of identity may vary depending on the genome and its complexity. In a human genome, the cut-off may be 80% or 90%. A cut-off of 80% means that a sequence having equal to or more than 80% identity with another sequence over 100 or more base pairs outside of its own region in the genome is excluded from the analysis at this step. Similarly, at a cut-off of 80%, a sequence having less than 80% identity with another sequence of relatively equal length in the genome is maintained and further interrogated using steps (b) through (d). The “sequenced genomic DNA of a species” refers to the known genomic sequence of a species. Known genomic DNA sequences are publicly available in various databases including NCBI databases, Human Genome Project databases, the UCSC genome databases, Ensembl databases, and the like, most or all of which are available online.

[0048] Step (a) may be performed by first generating a number of sequences for the region of interest starting at one position (typically an end of the region) and moving along the region at a particular interval. As an example, sequences that are 500 bases in length may be generated by starting at one end and moving along the region of interest every 100 bases. Each sequence will therefore overlap with certain other sequences. The length of the sequence and the distance between starting points of consecutive sequences may vary from these lengths. For example, the sequences may be 200, 300, 400, 500, 600 or 700 bases in length and the starting points may be spaced apart by 40, 60, 80, 100, 120 or 140 bases provided that neighboring sequences overlap with each other.

[0049] Step (a) may reveal unique overlapping sequences. In this case, the method may also comprise a step of generating a new sequence consisting of the unique overlapping sequences. The combined sequence, rather than the individual overlapping sequences, may then be used in step (b).

[0050] In step (b), one or more nucleic acid fragments ranging in length from about 30 to about 300 bases is identified from each unique nucleic acid (or sequence) identified in step (a). This step may be performed by limiting the length of probe that is desired. For example, it may be performed to identify fragments that are about 40 bases (e.g., 40+/−5 bases) or 70 bases (e.g., 70+/−10 bases) in length. These nucleic acid fragments are considered “putative probes” since it is from this subset of nucleic acids that the final probe set will be selected.

[0051] Once the fragments (or putative probes) are identified, so too are the amplification primer pairs that can be used to generate (e.g., amplify) each fragment. There may be a single primer pair for a nucleic acid fragment or there may be more than one primer pair for a nucleic acid fragment, depending on the length of the fragment. The primer length may vary. In some embodiments, the primer length ranges from about 18-22 base pairs. The total number of primer pairs per fragment may vary depending on the length of the fragment and the length of the desired probe. For example, a 500 base pair fragment can give rise to two probes that are 200 base pairs each in length or three or four probes that are 100 base pairs each in length. Primer sequence complexity and length will be generally uniform across a primer set. This is particularly true for primers that will amplified under the same amplification conditions including in the same reaction so that the likelihood of amplification is generally the same for all primer pairs in the set.

[0052] It is to be understood that step (b) may be carried out in reverse order, such that the primer pairs are first identified followed by identification of the putative probes. In this instance, the primer pairs are still selected based on the desired length of the probe. For example, if probes having a length of about 200 bases are desired, then primer pairs that yield about 200 bp fragments are chosen. An initial set of primer pairs may be generated by starting at an end of a nucleic acid sequence and moving along the sequence by certain intervals, in a manner similar to that of step (a). In some embodiments, there is no sequence overlap between primers. In some embodiments, there is no sequence overlap between the nucleic acid fragments that would be generated using the primer pairs. In some embodiments, there is at least one base pair between adjacent probes. Step (b) therefore identifies a putative probe set and a putative primer set.

[0053] The subsequent steps are directed towards excluding fragments from the putative probe set, thereby ultimately arriving at a final probe set that may be used in HD-FISH.

[0054] In step (c), a nucleic acid fragment (or putative probe) is eliminated from the putative probe set of (b) if the amplification primer pair used to amplify the nucleic acid fragment also amplifies other fragments. Step (c) therefore analyzes the ability of a primer pair to amplify one or more fragments from a nucleic acid sample. The primer pair must amplify only its associated fragment; if it fails to do so the pair and its associated fragment are excluded from the putative primer set and the putative probe set respectively. As an example, if the primer pair amplifies more than one fragment, then the pair and its associated fragment are excluded. If the primer pair amplifies a single fragment that is not its associated fragment, then the pair and its associated fragment are excluded.

[0055] Step (c) may be performed in the context of the entire genome or in the context of a limited region of the genome. For example, if the primer pair will ultimately be used to generate probes from a sample that comprises genomic DNA, then the analysis in step (c) should be carried out in the context of the complete genome of the species. However, if the primer pair will ultimately be used to generate probes from a limited region of the genome, then the analysis in step (c) should be carried out in the context of that limited region of the genome. This latter approach may be used if the probes were generated from, for example, a bacterial artificial chromosome (BAC). To be clear, the probes may be generated from a limited nucleic acid sample (e.g., a BAC) yet they may be used to screen a genomic sample such as an entire interphase nucleus or a complete set of metaphase chromosomes.

[0056] In step (d), nucleic acid fragments from (b) are screened for their uniqueness relative to other regions of genomic DNA of the species. One way of testing this is to determine if the fragment binds to more than one region in the genome. This screening is more stringent than that carried out in step (a). As an example, if the identity cut-off is set at 80% in step (a), then the identity cut-off is set to, for example, 70% in step (d). As described above, if the cut-off is 70%, then a nucleic acid fragment having equal to or more than 70% identity to a sequence in genomic DNA (other than itself) is excluded from the putative probe set. Under the same criteria, a nucleic acid fragment having less than 70% identity to sequences in genomic DNA are maintained in the putative probe set.

[0057] Steps (c) and (d) can be performed in either order (i.e., step (c) may be performed before or after step (d)).

[0058] It is to be understood that once the probes of interest are identified, so too are the amplification primer pairs that will amplify the probes of interest. This is because the method identifies suitable probes by analyzing not only the probe sequence and how likely it is to bind to other spurious regions in the genome, but also by analyzing the amplification primer pair and how likely it is to amplify other spurious regions from a genomic sample. Thus, the same method can be used to identify probes and/or their respective amplification primer pairs. It is also to be understood that the method may be used to identify a probe set for an entire genome or a probe set for a particular region of a genome, and similarly a primer set for an entire genome or a primer set for a particular region of the genome.

[0059] It is to be understood that the probes so identified may thereafter be generated in an amplification-dependent (e.g. PCR reaction) or an amplification-independent (e.g., direct synthesis) manner.

[0060] Another method provided by the invention involves step (a) and step (d) as recited above. Thus, the invention contemplates the identification of probes in the absence of identification of primers to amplify such probes.

[0061] The methods can be performed entirely with a computer and/or via a computer simulation and/or algorithm (e.g., in silico). Such computer simulations allow an end user to set various parameters such as length of the nucleic acids originally identified (e.g., in step (a)), length of probes and putative probes and thus placement of amplification primer pairs, degree of stringency to be applied when identifying unique sequences, and the like. The degree of stringency may be set as a percentage of identity. As an example, a combination of stringency (e.g., 80% cut-off) and a probe length of 200 or 300 base pairs may be used.

[0062] Steps (a) and (d) may be performed by comparing the generated nucleic acid sequences against a genomic sequence database. Computer programs such as BLAST and BLAT can be used for this purpose. BLAST is available from the NCBI website and BLAT is available from the online Ohio Supercomputer Center. Step (b) may be performed using computer programs such as Primer3. The Primer3 program is available online from a number of academic institutions including but not limited to Massachusetts Institute of Technology. Customized scripts for primer design may also be used. Step (c) may be performed using computer programs such as e-PCR. The e-PCR program is available online from NCBI. Customized scripts may also be used. It is also to be understood that one or more than one steps of the method (including all the steps of the method) may be performed manually.

[0063] Thus in some instances the method may be performed by a computer specifically programmed to carry out the step (a) through (d) described above or step (a) and step (d) only as described above. For example, the methods are performed by a computer that includes a processing module that carries out the method. The method may therefore be a computer-implemented method. In certain embodiments, the method is coded onto a computer-readable medium in the form of “programming”, where the term “computer storage readable medium” as used herein refers to any storage medium that participates in providing instructions and/or data to a computer for execution and/or processing. Examples of storage media include floppy disks, magnetic tape, CD-ROM, a hard disk drive, a ROM or integrated circuit, a magneto-optical disk, or a computer readable card such as a PCMCIA card and the like, whether or not such devices are internal or external to the computer.

[0064] Whether performed in silico or manually, the method can be followed by actual synthesis of the probe set. Synthesis of the probe may employ the primer set in an amplification reaction such as PCR. The amplification method can be used to label the probes with detectable labels such as fluorophores. This may be done by performing the amplification reaction in the presence of labeled nucleotides that are incorporated into the synthesized strands of DNA. As an example, all of a subset of nucleotides may be detectable labeled. When more than one type of nucleotide is labeled, all nucleotides are typically labeled with the same fluorophore (e.g., all labeled nucleotides are labeled with a FITC fluorophore). The probes may also be labeled uniformly by performing the amplification reaction using primers that are labeled. The labeled primer may be the forward or the reverse primer. It should be appreciated that the methods of the invention allow directed labeling of a specific strand of a probe by labeling either the forward or the reverse primer. This labeling flexibility is not typically available using FISH probes of the prior art. Primers may be labeled at their ends (e.g., 5′ end), or they may be labeled internally, or they may be labeled throughout. Preliminary experiments indicate that 5′ end labeling is sufficient. The primers may be labeled directly (i.e., they may be directly conjugated to a fluorophore) or they may be labeled indirectly (e.g., they may be biotinylated and then reacted with an avidin or streptavidin conjugated fluorophore.

[0065] Other means of attaching labels to nucleic acids are known in the art and include, for example, nick translation or end-labeling, and phosphorylation of the nucleic acid and subsequent attachment of a nucleic acid linker joining the oligonucleotides to a label. In certain embodiments, the FISH probes may be labeled by Universal Linkage System (ULS™ KREATECH Diagnostics). In brief, ULS™ labeling is based on the stable binding properties of platinum (II) to nucleic acids. The ULS™ molecule consists of a mono-functional platinum complex coupled to a detectable molecule of choice. Standard methods may be used for labeling the oligonucleotide, for example, as set out in Ausubel, et al. (Short Protocols in Molecular Biology, 3rd ed., Wiley & Sons, 1995) and Sambrook, et al. (Molecular Cloning: A Laboratory Manual, Third Edition, (2001) Cold Spring Harbor, N.Y.).

[0066] It is also to be understood that the probes of the invention may be synthesized directly rather than through an enzyme-mediated process such as PCR. Such directly synthesized probes may be labeled during synthesis or post-synthesis. Methods for such labeling are known in the art and reference may be made for example to U.S. Pat. Nos. 4,997,928, 5,262,536, 5,688,940 and 7,705,150, which evidence the ability to label nucleic acids.

[0067] The following is an example of how one method of the invention may be carried out. It is to be understood that this example is merely illustrative and that one of ordinary skill in the art with knowledge of the teachings provided herein will be able to vary the method within the spirit of the invention.

[0068] This example identifies probes for the entire human genome. Briefly, the sequence of each human chromosome is split into 500 bp tiled fragments, sliding at 100 bp intervals. Each fragment is then searched against a known human genome sequence using a computer program such as BLAT. Unique fragments are identified and, if overlapping, they are merged together. A computer program such as Primer3 is used to generate tiled primer pairs based on the unique fragments. Each primer pair so generate is then checked for uniqueness using a computer program such as e-PCR. Each unique fragment is again checked for uniqueness against the human genome using a more sensitive search such as a more sensitive BLAT search.

[0069] More specifically, each of the 23 human chromosomes is broken into, in this example, 500 bp fragments, sliding along the chromosome in 100 bp steps. This results in 250 million overlapping 500 bp fragments. Each 500 bp fragment is searched against the human genome with the BLAT software. The BLAT homology search finds matches in the genome with 80% or higher similarity, in this example. Fragments with non-self matches are discarded from further consideration. Unique 500 bp fragments are merged (or “stitched”) together to create contiguous blocks of non-repetitive DNA. Primer3 software is used to design primer pairs, separated, in this example, by 200-220 bp, tiled along the unique DNA stretches. Each primer pair identifies a potential probe for DNA-FISH. Default Primer3 parameters are used to pick the primer pairs. The Examples provided herein used the default Primer3 parameters with a target probe length set to 70, 100 or 200 base pairs. This resulted in 5,120,725 total primer pairs. To avoid cross-amplification, each primer pair is screened for specificity with e-PCR software. Mismatches of 0-2 bp per primer are permitted, in some instances. As an example, if 20/22 bases of the forward primer and the reverse primer are identical to another region, then the primer pair is excluded. Primer pairs that have non-self products are discarded. As an example, primer pairs that amplify another region, up to for example 500 base pairs, are excluded. This resulted in the exclusion of 40,705 primer pairs (and putative probes). The DNA sequences flanked by the primer pairs (i.e., the probes) are individually screened for uniqueness by another round of BLAT searching against the human genome. Probes with matches of 70% or higher identity outside of their own region are discarded. This further excluded 256,236 putative probes. The final probe count in the resultant probe set is 4,823,784. This probe set covers over 93% of the 2.9 Gb of sequenced human genomic DNA. Thus on average the probe set provides more than 50 probes per 100 kb of sequenced human genomic DNA.

[0070] Using the methods of the invention, probes specific for single genes have been generated. Examples of single gene targets include those provided below in Table 1. Single gene HD-FISH probes can therefore be prepared that are specific for genes such as ERBB2/HER2, MET, EGFR, BCR, ABL1, PML, RARalpha, PTEN, and RPS14. Alterations in each of these genes has been used to diagnose and/or prognose a particular condition. The alterations include but are not limited to amplifications (e.g., HER2 in breast cancer) and rearrangements and translocations (e.g., BCR/ABL1 and PML/RARα, both in leukemia). Other alterations are described in the Tables. The art is familiar with the use of these genes in diagnostic and prognostic testing.

TABLE 1

| GENE(S) | ABERRATION | DISEASE | IMPORTANCE |
|---|---|---|---|
| ERBB2/HER2 | amp(17)(q2.1) | Breast cancer | Patient Selection for |
| | | | Trastuzumab |
| MET | amp(7)(q31) | Breast cancer | Identification of patients |
| | | | possibly resistant to |
| | | | Trastuzumab |
| EGFR | amp(7)(p12) | Breast, colon, lung, | Patient selection for |
| | | head-and-neck cancer | Cetuximab and |
| | | | Panitumumab. |
| | | | Identification of patients |
| | | | possibly resistant to |
| | | | Trastuzumab |
| BCR; ABL1 | t(9; 22)(q34.1; q11.23) | Chronic myeloid | Patient selection for |
| | | leukemia | Imatinib, Dasatinib, and |
| | | | Nilotinib |
| PML; RARalpha | t(15; 17)(q22; q21) | Acute promyelocytic | Patient selection for |
| | | leukemia | ATRA and arsenic |
| | | | trioxide |
| PTEN | del(10)(q23.3) | Breast cancer | Identification of patients |
| | | | possibly resistant to |
| | | | Trastuzumab |
| RPS14 | del(5)q32) | Myelodysplastic | Patient selection for |
| | | syndrome (5q minus | Lenalidomide |
| | | syndrome) | |
| EML4; ALK | t(2; 2)(2p21; 2p23); | Lung cancer | Patient selection for |
| | inv(2) | | Crizotinib |

[0071] The methods can also be used to generate “spotting” HD-FISH probes that detect a chromosome or a chromosomal region (such as a chromosomal arm) as a cloud of dots. Examples of such chromosomes or chromosomal regions include those provided below in Table 2. These spotting probe sets may consist of a variable number of probes in defined genes known to have low copy number variation across different diseases. Accordingly, alteration in the level of staining in these chromosomes can be used for diagnostic or prognostic assessments.

TABLE 2

| CHROMOSOME | ABERRATION | DISEASE | IMPORTANCE |
|---|---|---|---|
| 1p | del(1p) | Anaplastic | Diagnosis of gliomas |
| | | Oligodendroglioma | |
| 5q | del(5q) | Myelodysplastic syndromes | Diagnosis of myeloid |
| | | and acute myeloid leukemia | leukemias |
| 7q | del(7q) | Acute myeloid leukemia | Diagnosis of myeloid |
| | | | leukemias |
| 8 | +8 | Acute myeloid leukemia | Diagnosis of myeloid |
| | | | leukemias |
| 12 | +12 | Chronic lymphocytic | Diagnosis of lymphatic |
| | | leukemia | leukemias |
| 13 | +13 | Patau syndrome | Pre-natal screening |
| 18 | +18 | Edwards syndrome | Pre-natal screening |
| 19q | del(19q) | Anaplastic | Diagnosis of gliomas |
| | | oligodendroglioma | |
| 20q | del(20q) | Myelodysplastic syndromes, | Diagnosis of leukemias |
| | | acute myeloid leukemia, | |
| | | and chromic | |
| | | myeloproliferative diseases | |
| 21 | +21 | Down syndrome | Pre-natal screening |

[0072] Provided below in Table 2A are the SEQ ID NOs for exemplary primer sets for generating probes that bind to the genes and chromosomal regions listed in Tables 1 and 2. The corresponding sequence listing is provided and incorporated herewith, and is to be considered part of the application. It will be understood in view of the invention that the primers themselves may be used as probes or they may be used to generate probes of longer length. All or a subset of primer pairs within a primer set for a particular gene or chromosomal region of interest may be used. Ensembl gene IDs are provided for each primer set for a gene. For spotting probes, each primer set contains the list of primers for a chromosome or arm (e.g., 5q, 7q, 19q for long arms of chromosomes 5, 7, 19). Primer pairs in each set are numbered progressively from the telomere of the short arm towards the telomere of the long arm.

TABLE 2A

| Gene Name | Forward Primers* | Reverse Primers* |
|---|---|---|
| ABL1 | SEQ ID NOs: 1-264 | SEQ ID NOs: 265-528 |
| ID: ENSG00000097007 | | |
| BCR | SEQ ID NOs: 529-784 | SEQ ID NOs: 785-1040 |
| ID: ENSG00000186716 | | |
| EGFR | SEQ ID NOs: 1041-1652 | SEQ ID NOs: 1653-2264 |
| ID: ENSG00000146648 | | |
| HER2 3 kb probe | SEQ ID NOs: 2265-2279 | SEQ ID NOs: 2280-2294 |
| HER2 40 kb probe | SEQ ID NOs: 2295-2349 | SEQ ID NOs: 2350-2404 |
| MET | SEQ ID NOs: 2405-2701 | SEQ ID NOs: 2702-2998 |
| ID: ENSG00000105976 | | |
| PML | SEQ ID NOs: 2999-3108 | SEQ ID NOs: 3109-3218 |
| ID: ENSG00000140464 | | |
| PTEN | SEQ ID NOs: 3219-3422 | SEQ ID NOs: 3423-3626 |
| ID: ENSG00000171862 | | |
| RARα | SEQ ID NOs: 3627-3756 | SEQ ID NOs: 3757-3886 |
| ID: ENSG00000131759 | | |
| RPS14 | SEQ ID NOs: 3887-3967 | SEQ ID NOs: 3968-4048 |
| ID: ENSG00000164587 | | |

Chr5q spotting probe

| | | |
|---|---|---|
| Chr5q-1 | SEQ ID NOs: 4049-4144 | SEQ ID NOs: 4145-4240 |
| Chr5q-2 | SEQ ID NOs: 4241-4336 | SEQ ID NOs: 4337-4432 |
| Chr5q-3 | SEQ ID NOs: 4433-4528 | SEQ ID NOs: 4529-4624 |
| Chr5q-4 | SEQ ID NOs: 4625-4720 | SEQ ID NOs: 4721-4816 |
| Chr5q-5 | SEQ ID NOs: 4817-4912 | SEQ ID NOs: 4913-5008 |
| Chr5q-6 | SEQ ID NOs: 5009-5104 | SEQ ID NOs: 5105-5200 |
| Chr5q-7 | SEQ ID NOs: 5201-5296 | SEQ ID NOs: 5297-5392 |
| Chr5q-8 | SEQ ID NOs: 5393-5488 | SEQ ID NOs: 5489-5584 |
| Chr5q-9 | SEQ ID NOs: 5585-5680 | SEQ ID NOs: 5681-5776 |
| Chr5q-10 | SEQ ID NOs: 5777-5872 | SEQ ID NOs: 5873-5968 |
| Chr5q-11 | SEQ ID NOs: 5969-6064 | SEQ ID NOs: 6065-6160 |
| Chr5q-12 | SEQ ID NOs: 6161-6256 | SEQ ID NOs: 6257-6352 |
| Chr5q-13 | SEQ ID NOs: 6353-6448 | SEQ ID NOs: 6449-6544 |

Chr7q spotting probe

| | | |
|---|---|---|
| Chr7q-1 | SEQ ID NOs: 6545-6640 | SEQ ID NOs: 6641-6736 |
| Chr7q-2 | SEQ ID NOs: 6737-6832 | SEQ ID NOs: 6833-6928 |
| Chr7q-3 | SEQ ID NOs: 6929-7024 | SEQ ID NOs: 7025-7120 |
| Chr7q-4 | SEQ ID NOs: 7121-7216 | SEQ ID NOs: 7217-7312 |
| Chr7q-5 | SEQ ID NOs: 7313-7408 | SEQ ID NOs: 7409-7504 |
| Chr7q-6 | SEQ ID NOs: 7505-7600 | SEQ ID NOs: 7601-7696 |
| Chr7q-7 | SEQ ID NOs: 7697-7792 | SEQ ID NOs: 7793-7888 |
| Chr7q-8 | SEQ ID NOs: 7889-7984 | SEQ ID NOs: 7985-8080 |
| Chr7q-9 | SEQ ID NOs: 8081-8176 | SEQ ID NOs: 8177-8272 |

Chr8 spotting probe

| | | |
|---|---|---|
| Chr8-1 | SEQ ID NOs: 8273-8368 | SEQ ID NOs: 8369-8464 |
| Chr8-2 | SEQ ID NOs: 8465-8560 | SEQ ID NOs: 8561-8656 |
| Chr8-3 | SEQ ID NOs: 8657-8752 | SEQ ID NOs: 8753-8848 |
| Chr8-4 | SEQ ID NOs: 8849-8944 | SEQ ID NOs: 8945-9040 |
| Chr8-5 | SEQ ID NOs: 9041-9136 | SEQ ID NOs: 9137-9232 |
| Chr8-6 | SEQ ID NOs: 9233-9328 | SEQ ID NOs: 9329-9424 |
| Chr8-7 | SEQ ID NOs: 9425-9520 | SEQ ID NOs: 9521-9616 |
| Chr8-8 | SEQ ID NOs: 9617-9712 | SEQ ID NOs: 9713-9808 |
| Chr8-9 | SEQ ID NOs: 9809-9904 | SEQ ID NOs: 9905-10000 |
| Chr8-10 | SEQ ID NOs: 10,001-10096 | SEQ ID NOs: 10,097-10192 |
| Chr8-11 | SEQ ID NOs: 10193-10288 | SEQ ID NOs: 10289-10384 |
| Chr8-12 | SEQ ID NOs: 10385-10480 | SEQ ID NOs: 10481-10576 |
| Chr8-13 | SEQ ID NOs: 10577-10672 | SEQ ID NOs: 10673-10768 |
| Chr8-14 | SEQ ID NOs: 10769-10864 | SEQ ID NOs: 10865-10960 |
| Chr8-15 | SEQ ID NOs: 10961-11056 | SEQ ID NOs: 11057-11152 |

Chr12 spotting probe

| | | |
|---|---|---|
| Chr12-1 | SEQ ID NOs: 11153-11248 | SEQ ID NOs: 11249-11344 |
| Chr12-2 | SEQ ID NOs: 11345-11440 | SEQ ID NOs: 11441-11536 |
| Chr12-3 | SEQ ID NOs: 11537-11632 | SEQ ID NOs: 11633-11728 |
| Chr12-4 | SEQ ID NOs: 11729-11824 | SEQ ID NOs: 11825-11920 |
| Chr12-5 | SEQ ID NOs: 11921-12016 | SEQ ID NOs: 12017-12112 |
| Chr12-6 | SEQ ID NOs: 12113-12208 | SEQ ID NOs: 12209-12304 |
| Chr12-7 | SEQ ID NOs: 12305-12400 | SEQ ID NOs: 12401-12496 |
| Chr12-8 | SEQ ID NOs: 12497-12592 | SEQ ID NOs: 12593-12688 |
| Chr12-9 | SEQ ID NOs: 12689-12784 | SEQ ID NOs: 12785-12880 |
| Chr12-10 | SEQ ID NOs: 12881-12976 | SEQ ID NOs: 12977-13072 |
| Chr12-11 | SEQ ID NOs: 13073-13168 | SEQ ID NOs: 13169-13264 |
| Chr12-12 | SEQ ID NOs: 13265-13360 | SEQ ID NOs: 13361-13456 |
| Chr12-13 | SEQ ID NOs: 13457-13552 | SEQ ID NOs: 13553-13648 |

Chr13 spotting probe

| | | |
|---|---|---|
| Chr13-1 | SEQ ID NOs: 13649-13744 | SEQ ID NOs: 13745-13840 |
| Chr13-2 | SEQ ID NOs: 13841-13936 | SEQ ID NOs: 13937-14032 |
| Chr13-3 | SEQ ID NOs: 14033-14128 | SEQ ID NOs: 14129-14224 |
| Chr13-4 | SEQ ID NOs: 14225-14320 | SEQ ID NOs: 14321-14416 |
| Chr13-5 | SEQ ID NOs: 14417-14512 | SEQ ID NOs: 14513-14608 |
| Chr13-6 | SEQ ID NOs: 14609-14704 | SEQ ID NOs: 14705-14800 |
| Chr13-7 | SEQ ID NOs: 14801-14896 | SEQ ID NOs: 14897-14992 |
| Chr13-8 | SEQ ID NOs: 14993-15088 | SEQ ID NOs: 15089-15184 |
| Chr13-9 | SEQ ID NOs: 15185-15280 | SEQ ID NOs: 15281-15376 |
| Chr13-10 | SEQ ID NOs: 15377-15472 | SEQ ID NOs: 15473-15568 |

Chr17 spotting probe

| | | |
|---|---|---|
| Chr17-1 | SEQ ID NOs: 15569-15623 | SEQ ID NOs: 15624-15678 |
| Chr17-2 | SEQ ID NOs: 15679-15733 | SEQ ID NOs: 15734-15788 |
| Chr17-3 | SEQ ID NOs: 15789-15844 | SEQ ID NOs: 15845-15900 |
| Chr17-4 | SEQ ID NOs: 15901-15956 | SEQ ID NOs: 15957-16012 |
| Chr17-5 | SEQ ID NOs: 16013-16067 | SEQ ID NOs: 16068-16122 |
| Chr17-6 | SEQ ID NOs: 16123-16175 | SEQ ID NOs: 16176-16228 |
| Chr17-7 | SEQ ID NOs: 16229-16283 | SEQ ID NOs: 16284-16338 |
| Chr17-8 | SEQ ID NOs: 16339-16392 | SEQ ID NOs: 16393-16446 |
| Chr17-9 | SEQ ID NOs: 16447-16500 | SEQ ID NOs: 16501-16554 |
| Chr17-10 | SEQ ID NOs: 16555-16607 | SEQ ID NOs: 16608-16660 |

Chr18 spotting probe

| | | |
|---|---|---|
| Chr18-1 | SEQ ID NOs: 16661-16756 | SEQ ID NOs: 16757-16852 |
| Chr18-2 | SEQ ID NOs: 16853-16948 | SEQ ID NOs: 16949-17044 |
| Chr18-3 | SEQ ID NOs: 17045-17140 | SEQ ID NOs: 17141-17236 |
| Chr18-4 | SEQ ID NOs: 17237-17332 | SEQ ID NOs: 17333-17428 |
| Chr18-5 | SEQ ID NOs: 17429-17524 | SEQ ID NOs: 17525-17620 |
| Chr18-6 | SEQ ID NOs: 17621-17716 | SEQ ID NOs: 17717-17812 |
| Chr18-7 | SEQ ID NOs: 17813-17908 | SEQ ID NOs: 17909-18004 |
| Chr18-8 | SEQ ID NOs: 18005-18100 | SEQ ID NOs: 18101-18196 |

Chr19q spotting probe

| | | |
|---|---|---|
| Chr19q-1 | SEQ ID NOs: 18197-18292 | SEQ ID NOs: 18293-18388 |
| Chr19q-2 | SEQ ID NOs: 18389-18484 | SEQ ID NOs: 18485-18580 |
| Chr19q-3 | SEQ ID NOs: 18581-18676 | SEQ ID NOs: 18677-18772 |
| Chr19q-4 | SEQ ID NOs: 18773-18868 | SEQ ID NOs: 18869-18964 |
| Chr19q-5 | SEQ ID NOs: 18965-19060 | SEQ ID NOs: 19061-19156 |
| Chr19q-6 | SEQ ID NOs: 19157-19252 | SEQ ID NOs: 19253-19348 |

Chr20q spotting probe

| | | |
|---|---|---|
| Chr20q-1 | SEQ ID NOs: 19349-19444 | SEQ ID NOs: 19445-19540 |
| Chr20q-2 | SEQ ID NOs: 19541-19636 | SEQ ID NOs: 19637-19732 |
| Chr20q-3 | SEQ ID NOs: 19733-19828 | SEQ ID NOs: 19829-19924 |
| Chr20q-4 | SEQ ID NOs: 19925-20020 | SEQ ID NOs: 20021-20116 |
| Chr20q-5 | SEQ ID NOs: 20117-20212 | SEQ ID NOs: 20213-20308 |
| Chr20q-6 | SEQ ID NOs: 20309-20404 | SEQ ID NOs: 20405-20500 |
| Chr20q-7 | SEQ ID NOs: 20501-20596 | SEQ ID NOs: 20597-20692 |

Chr21 spotting probe

| | | |
|---|---|---|
| Chr21-1 | SEQ ID NOs: 20693-20788 | SEQ ID NOs: 20789-20884 |
| Chr21-2 | SEQ ID NOs: 20885-20980 | SEQ ID NOs: 20981-21076 |
| Chr21-3 | SEQ ID NOs: 21077-21172 | SEQ ID NOs: 21173-21268 |
| Chr21-4 | SEQ ID NOs: 21269-21364 | SEQ ID NOs: 21365-21460 |
| Chr21-5 | SEQ ID NOs: 21461-21556 | SEQ ID NOs: 21557-21652 |
| Chr21-6 | SEQ ID NOs: 21653-21748 | SEQ ID NOs: 21749-21844 |
| Chr21-7 | SEQ ID NOs: 21845-21940 | SEQ ID NOs: 21941-22036 |
| ALK1 | SEQ ID NOs: 22037-23759 | SEQ ID NOs: 23760-25482 |
| ID: ENSG00000171094 | | |
| EML4 | SEQ ID NOs: 25483-25781 | SEQ ID NOs: 25782-26080 |
| ID: ENSG00000143924 | | |

Chr1p spotting probe

| | | |
|---|---|---|
| Chr1p-1 | SEQ ID NOs: 26081-26176 | SEQ ID NOs: 26177-26272 |
| Chr1p-2 | SEQ ID NOs: 26273-26368 | SEQ ID NOs: 26369-26464 |
| Chr1p-3 | SEQ ID NOs: 26465-26560 | SEQ ID NOs: 26561-26656 |
| Chr1p-4 | SEQ ID NOs: 26657-26752 | SEQ ID NOs: 26753-26848 |
| Chr1p-5 | SEQ ID NOs: 26849-26944 | SEQ ID NOs: 26945-27040 |
| Chr1p-6 | SEQ ID NOs: 27041-27136 | SEQ ID NOs: 27137-27232 |
| Chr1p-7 | SEQ ID NOs: 27233-27328 | SEQ ID NOs: 27329-27424 |
| Chr1p-8 | SEQ ID NOs: 27425 27520 | SEQ ID NOs: 27521-27616 |
| Chr1p-9 | SEQ ID NOs: 27617-27712 | SEQ ID NOs: 27713-27808 |
| Chr1p-10 | SEQ ID NOs: 27809-27904 | SEQ ID NOs: 27905-28000 |
| Chr1p-11 | SEQ ID NOs: 28001-28096 | SEQ ID NOs: 28097-28192 |
| Chr1p-12 | SEQ ID NOs: 28193-28288 | SEQ ID NOs: 28289-28384 |

*It is to be understood that there is one reverse primer for each forward primer. The sequence listing provides all the forward primers for a given gene or chromosome and then all the reverse primers for a given gene or chromosome. For each gene or chromosome, the first forward primer (first forward primer SEQ ID NO:) pairs with the first reverse primer (first reverse primer SEQ ID NO:), the second forward primer (second forward primer SEQ ID NO:) pairs with the second reverse primer (second reverse primer SEQ ID NO:), and so on throughout the primer set, such that the last forward primer (last forward primer SEQ ID NO:) pairs with the last reverse primer (last reverse primer SEQ ID NO:).

[0073] Accordingly, the invention also provides probe sets and primer sets that are useful in HD-FISH, and compositions and kits comprising one or both of these sets.

[0074] The HD-FISH probe set may comprise probes that are about 30-300 bases in length. It is to be understood that probes of these various lengths may be identified by performing the methods of the invention (and thereby setting a desired length range for the identified probes). Alternatively, probes of a desired length may be generated based on the sequences of longer probes. For example, the methods of the invention may be performed to identity probes that are 200 bases in length. Such probes may be used to generate probes that are 100 bases in length (e.g., by selecting a contiguous 100 base sequence therein such as without limitation the 5′ most 100 bases, or the middle 100 bases, or the 3′ most 100 bases).

[0075] The HD-FISH probe set may comprise probes that are labeled with detectable labels. Detectable labels include but are not limited to fluorophores. The nature of the detectable label will be governed by the detection system used to detect the probe binding events. In most instances, fluorophores are the label of choice. The primers and probes may also be coupled to biotin, as an example, and the locus may be visualized after hybridization using Tyramide Signal Amplification (TSA™, from Perkin Elmer).

[0076] The probes may be uniformly labeled. Uniform labeling refers to similar (or identical) location and amount of label between probes. An example of uniform labeling is 5′ end-labeled. Uniform labeling of this nature may be achieved using PCR and uniformly labeled forward or reverse primers.

[0077] The probes may be single or double-stranded.

[0078] In some instances, the HD-FISH probe set comprises one or more subsets of probes that bind to a single (i.e., contiguous) 100 kb region of sequenced human genomic DNA. A probe subset may comprise 50 or more probes.

[0079] In some instances, the HD-FISH probe set comprises multiple probe subsets that, in aggregate, bind to 93% of 100 kb regions of sequenced human genomic DNA. A probe subset may comprise 50 or more probes.

[0080] The invention also provides HD-FISH primer sets that amplify an HD-FISH probe set. The comprising one or more primer pair subsets each having 50 or more probes that together hybridize to 93% of discrete 100 kb regions of sequenced human genomic DNA.

[0081] The invention also provides a method for performing FISH using the probe sets and/or the primer sets described herein. The method comprises performing FISH in the presence of an HD-FISH probe set, or a subset thereof, that hybridizes to a 10 kb region of interest, wherein the probes are about 30 to about 300 bases including about 40 to about 300 bases in length, and wherein a FISH result that differs from a control indicates a chromosomal abnormality.

[0082] The invention provides another method for performing FISH using the probe sets and/or the primer sets described herein. The method comprises performing FISH in the presence of an HD-FISH probe set, or a subset thereof, that hybridizes to a 3 kb region of interest, wherein the probes are about 70 to about 300 bases in length, and wherein a FISH result that differs from a control indicates a chromosomal abnormality.

[0083] In some instances, the HD-FISH probe set or subset thereof comprises 5-30 probes. The HD-FISH probe set or subset thereof may comprise 10 probes. In some embodiments, a set or subset may comprise 5, 10, 15, 20, 25, 30, 35, 40, or 50 probes.

[0084] In some embodiments, the invention contemplates synthesizing the HD-FISH probe set or a subset thereof using an amplification method such as a PCR reaction. Single-stranded probes, including single-stranded DNA probes, can also be obtained commercially from sources such as Bioneer (Extendamers™), IDT (Ultramer™), and Biosearch Technologies. Based on the teachings provided herein including but not limited to the primer pairs provided herein, an end user will be able to obtain the sequences of probes suitable for HD-PCR, even in silico, and will then be able to generate such probe sequences without the need for amplification. Such probes, whether generated by amplification or by direct synthesis, can be used, inter alia, in interphase and metaphase chromosome spreads.

[0085] In general terms, once labeled, the probes are hybridized to a sample containing intact chromosomes, and the binding is analyzed. For example, an interphase or metaphase chromosome preparation may be produced. The chromosomes are attached to a substrate, e.g., glass, contacted with the probe and incubated under hybridization conditions. Wash steps remove all un-hybridized or partially-hybridized probes, and the results are visualized and quantified using a microscope that is capable of exciting the dye and recording images. FISH methods are described in Ried et al., Human Molecular Genetics, Vol 7, 1619-1626; Speicher et al., Nature Genetics, 12, 368-376, 1996; Schrock et al., Science, 494-497, 1996; Griffin et al., Cytogenet Genome Res. 2007; 118(2-4):148-56; Peschka et al., Prenat Diagn., December 1999; 19(12):1143-9; Hilgenfeld et al., Curr Top Microbiol Immunol., 1999, 246: 169-74, the contents of which are incorporated by reference herein.

[0086] Prior to in situ hybridization, the FISH probes may be denatured. Denaturation is typically performed by incubating in the presence of high pH, heat (e.g., temperatures from about 70° C. to about 95° C.), organic solvents such as formamide and tetraalkylammonium halides, or combinations thereof.

[0087] Intact chromosomes are contacted with labeled probes under in situ hybridization conditions. “In situ hybridization conditions” are conditions that facilitate annealing between a nucleic acid and the complementary nucleic acid in the intact chromosomes. Certain parameters of the hybridization reaction vary, depending on the concentrations, base compositions, complexities, and lengths of the probes, as well as salt concentrations, temperatures, and length of incubation. For example, in situ hybridizations may be performed in hybridization buffer containing 1×-2×SSC, 50% formamide, and blocking DNA to suppress non-specific hybridization. In general, hybridization conditions include temperatures of about 25° C. to about 55° C., and incubation times of about 0.5 hours to about 96 hours. Suitable hybridization conditions for a set of oligonucleotides and chromosomal target can be determined via experimentation which is routine for one of skill in the art. In some embodiments, the hybridization conditions comprise a formamide concentration that may range from about 55-75%, or from about 60-70%, or from about 65-70%, or about 68% formamide. This is above the average formamide concentration of 50% that is typically used in hybridization reactions. It was found in accordance with the invention that shorter probes (e.g., 30-70 bases in length) could perform as well as longer probes (e.g., 100-300 bases) using the same hybridization conditions comprising higher formamide concentrations.

[0088] Hybridization to interphase nuclei may be performed using standard protocols including those that employ ethanol dehydration, as well as protocols that employ liquid nitrogen (e.g., 3D FISH protocol developed by Cremer et al. to preserve the 3D architecture of the nucleus).

[0089] Fluorescence of a hybridized chromosome can be evaluated using a fluorescent microscope. In general, excitation radiation, from an excitation source having a first wavelength, passes through excitation optics. The excitation optics causes the excitation radiation to excite the sample. In response, fluorescent molecules in the sample emit radiation that has a wavelength that is different from the excitation wavelength. Collection optics then collects the emission from the sample. The computer also can transform the data collected during the assay into another format for presentation. In general, known robotic systems and components can be used.

[0090] In certain embodiments, the signal from the binding of the labeled probe to a chromosome may be compared with that of a reference chromosome. The reference chromosome may be from a healthy or wild-type subject. Briefly, the method comprises contacting under in situ hybridization conditions a test chromosome from the cellular sample with a plurality of fluorescently-labeled FISH probes identified and optionally generated by the methods of the invention and contacting under in situ hybridization conditions a reference chromosome with the same plurality of fluorescently-labeled FISH probes. After hybridization, the emission spectra created from the unique binding patterns from the test chromosome are compared against those of the reference chromosome. This and other methods described herein may be carried out using pluralities of chromosomes that may be indistinguishable from each other, such as for example in interphase nuclei.

[0091] Thus, the structure of a test chromosome may be determined by comparing the pattern of binding of the labeled FISH probes to the test chromosome with the binding pattern of the same labeled FISH probes with a reference chromosome. The binding pattern of the reference chromosome may be determined before, after or at the same time as the binding pattern for the test chromosome. This determination may be carried out either manually or in an automated system. The binding pattern associated with the test chromosome can be compared to the binding pattern that would be expected for known deletions, insertions, translocation, fragile sites and other more complex rearrangements, and/or refined breakpoints. The matching may be performed by using computer-based analysis software known in the art. Determination of identity may be done manually (e.g., by viewing the data and comparing the signatures by hand), automatically (e.g., by employing data analysis software configured specifically to match optically detectable signature), or using a combination thereof.

[0092] In another embodiment, the test sample is from a subject suspected of having a particular condition (e.g., a particular cancer) and the reference sample may comprise a negative control (e.g., non-cancerous) representing a wild-type genome and second test sample (or a positive control) representing the particular condition associated with a known chromosomal rearrangement. In this embodiment, comparison of all these samples with each other may reveal not only if the test sample yields a result that is different from the wild-type genome but also if the test sample may have the same or similar genomic rearrangements as another test (e.g., cancer) sample.

[0093] The methods and compositions of the invention find use in myriad of nucleic acid sequence detection applications of interest such as genome mapping, diagnosis, or investigation of various types of genetic abnormalities, cancer or other diseases, including but not limited to, acute and chronic leukemia including chronic myelogenous leukemia (e.g., having translocation between chromosomes 9 and 22) and acute promyelocytic leukemia (e.g., having translocation between chromosomes 15 and 17); lymphoma; multiple myeloma; breast cancer (e.g., having HER2 amplification); lung cancer (e.g., having inversion of chromosome 2 p arm fusing EML4 and ALK genes); colon cancer; prostate cancer; sarcomas and tumors of mesenchymal origin; brain tumors including oligodendroglioma; Alzheimer's disease; Parkinson's disease; epilepsy; amyotrophic lateral sclerosis; multiple sclerosis; stroke; autism; Cri du chat (truncation on the short arm on chromosome 5), 1p36 deletion syndrome (loss of part of the short arm of chromosome 1), Angelman syndrome (loss of part of the long arm of chromosome 15); Prader-Willi syndrome (loss of part of the short arm of chromosome 15); Velocardiofacial syndrome (loss of part of the long arm of chromosome 22); Turner syndrome (single X chromosome); Klinefelter syndrome (an extra X chromosome); Edwards syndrome (trisomy of chromosome 18); Down syndrome (trisomy of chromosome 21); Patau syndrome (trisomy of chromosome 13); and trisomies 8, 9 and 16, which generally do not survive to birth.

[0094] The disease may be genetically inherited (germline mutation) or sporadic (somatic mutation). Many exemplary chromosomal rearrangements discussed herein are associated with and are thought to be a factor in producing these disorders. Knowing the type and the location of the chromosomal rearrangement may greatly aid the diagnosis, prognosis, and understanding of various mammalian diseases.

[0095] Certain of the above-described methods can also be used to detect diseased cells more easily than standard cytogenetic methods. The above-described methods do not require living cells and can be quantified automatically since a computer can be programmed to count the number and/or arrangement of fluorescent dots present.

[0096] The term “nucleic acid” refers to a polymer of any length composed of nucleotides, e.g., deoxyribonucleotides or ribonucleotides. The terms “ribonucleic acid” and “RNA” as used herein mean a polymer composed of ribonucleotides. The terms “deoxyribonucleic acid” and “DNA” as used herein mean a polymer composed of deoxyribonucleotides.

[0097] The phrase “labeled probes” refers to nucleic acids that are detectably labeled, e.g., fluorescently labeled, such that the presence of the probe as well as any target sequence to which the probe is bound can be detected by assessing the presence of the label.

[0098] The term “hybridization” refers to the specific binding of a nucleic acid to a complementary nucleic acid via Watson-Crick base pairing. The term “in situ hybridization” refers to specific binding of a nucleic acid to a metaphase or interphase chromosome.

[0099] The terms “hybridizing” and “binding”, with respect to nucleic acids, are used interchangeably.

[0100] The term “stringent assay conditions” refers to conditions that are compatible to produce binding pairs of nucleic acids, e.g., probes and targets, of sufficient complementarity to provide for the desired level of specificity in the assay while being incompatible to the formation of binding pairs between binding members of insufficient complementarity to provide for the desired specificity. Stringent assay conditions are the summation or combination (totality) of both hybridization and wash conditions.

[0101] A “stringent hybridization” and “stringent hybridization wash conditions” in the context of nucleic acid hybridization (e.g., as in array, Southern or Northern hybridizations) are sequence dependent, and are different under different experimental parameters. Stringent hybridization conditions that can be used to identify nucleic acids within the scope of the invention can include, e.g., hybridization in a buffer comprising 50% formamide, 5×SSC, and 1% SDS at 42° C., or hybridization in a buffer comprising 5×SSC and 1% SDS at 65° C. both with a wash of 0.2×SSC and 0.1% SDS at 65° C. Other stringent hybridization conditions can also include a hybridization in a buffer of 40% formamide, 1 M NaCl, and 1% SDS at 37° C., and a wash in 1×SSC at 45° C. Alternatively, hybridization to filter-bound DNA in 0.5 M NaHPO₄, 7% sodium dodecyl sulfate (SDS), 1 mM EDTA at 65° C., and washing in 0.1×SSC/0.1% SDS at 68° C. can be employed. Additional stringent hybridization conditions include hybridization at 60° C. or higher and 3×SSC (450 mM sodium chloride/45 mM sodium citrate) or incubation at 42° C. in a solution containing 30% formamide, 1 M NaCl, 0.5% sodium sarcosine, 50 mM MES, pH 6.5. Those of ordinary skill will readily recognize that alternative but comparable hybridization and wash conditions can be utilized to provide conditions of similar stringency.

[0102] In certain embodiments, the stringency of the wash conditions determines whether a nucleic acid is specifically hybridized to a probe. Wash conditions used to identify nucleic acids may include, e.g. a salt concentration of about 0.02 molar at pH 7 and a temperature of at least about 50° C. or about 55° C. to about 60° C.; or, a salt concentration of about 0.15 M NaCl at 72° C. for about 15 minutes; or, a salt concentration of about 0.2×SSC at a temperature of at least about 50° C. or about 55° C. to about 60° C. for about 15 to about 20 minutes; or, the hybridization complex is washed twice with a solution with a salt concentration of about 2×SSC containing 0.1% SDS at room temperature for 15 minutes and then washed twice by 0.1×SSC containing 0.1% SDS at 68° C. for 15 minutes; or, equivalent conditions. Stringent conditions for washing can also be, e.g., 0.2×SSC/0.1% SDS at 42° C. In instances wherein the nucleic acid molecules are deoxyoligonucleotides (“oligos”), stringent conditions can include washing in 6×SSC/0.05% sodium pyrophosphate at 37° C. (for 14-base oligos), 48° C. (for 17-base oligos), 55° C. (for 20-base oligos), and 60° C. (for 23-base oligos). See Sambrook, Ausubel, or Tijssen for detailed descriptions of equivalent hybridization and wash conditions and for reagents and buffers, e.g., SSC buffers and equivalent reagents and conditions.

[0103] In some embodiments, a 3D-FISH buffer is used that comprises 68% formamide, 1.7×SSC, 10% dextran sulphate, 50 mM Na2HPO4/NaH2PO4, 1 mM EDTA, and 5×Denhardt's solution.

[0104] In some embodiments, a universal buffer is used (e.g., for all other fixation procedures including for example methanol-acetic acid fixation). This universal buffer comprises 50% formamide, 1.7×SSC, 10% dextran sulphate, 50 mM Na2HPO4/NaH2PO4, 1 mM EDTA, and 5×Denhardt's solution.

[0105] The terms “plurality”, “set” or “population” are used interchangeably to mean 2 or more, including up to 5, 10, 20, 30, 40, 50, 60, 70, 80, 90, 100, 500, 1000, 10000, 100000, 1000000, 10,000,000, or 100,000,000.

[0106] The term “chromosomal region” refers to a contiguous length of nucleotides in a genome of an organism. A chromosomal region may be in the range of 10 kb in length to an entire chromosome, e.g., 100 kb to 10 MB for example.

[0107] The term “banding pattern” refers to the pattern of banding of a set of labeled probes to an intact chromosome.

[0108] The term “genome” refers to all nucleic acid sequences (coding and non-coding) and elements present in or originating from any prokaryotic or eukaryotic organism. The term genome also applies to any naturally occurring or induced variation of these sequences that may be present in a mutant or disease variant of any cell type. For example, the human genome consists of approximately 3×10⁹ base pairs of DNA organized into distinct chromosomes. The genome of a normal diploid somatic human cell consists of 22 pairs of autosomes (chromosomes 1 to 22) and either chromosomes X and Y (males) or a pair of chromosome X (female) for a total of 46 chromosomes. A genome of a cancer cell may contain variable numbers of each chromosome in addition to deletions, rearrangements and amplification of any sub-chromosomal region or DNA sequence.

[0109] The term “genomic sample” refers to a material or mixture of materials, containing genetic material from a species. The term “genomic DNA” as used herein refers to deoxyribonucleic acids that are obtained from a species. The terms “genomic sample” and “genomic DNA” encompass genetic material that may have undergone purification, fragmentation, or amplification. The genomic sample may be prepared using any convenient protocol. In many embodiments, the genomic sample is prepared by first obtaining a starting composition of genomic DNA, e.g., a nuclear fraction of a cell lysate, where any convenient means for obtaining such a fraction may be employed and numerous protocols for doing so are well known in the art. In certain embodiments, the genomic sample may comprise a portion of the genome, e.g., one or more specific chromosomes or regions thereof, such as PCR amplified regions produced with a pairs of specific primers.

[0110] The term “chromosomal rearrangement” refers to an event where one or more parts of a chromosome are rearranged within a single chromosome or between chromosomes. In certain cases, a chromosomal rearrangement may reflect an abnormality in chromosome structure. A chromosomal rearrangement may be an inversion, a deletion, an insertion or a translocation, for example.

[0111] The term “primer” refers to an oligonucleotide that has a nucleotide sequence that is complementary to a region of a nucleic acid to be amplified. A primer binds to the complementary region and is extended, using the target nucleic acid as the template, under primer extension conditions. A primer may be in the range of about 5 to about 20 nucleotides although primers outside of this length are envisioned.

[0112] The term “genomic distance” means the number of nucleotides separating two probe positions on the contiguous sequence of interest. The probe position may be determined in terms of the 5′ most nucleotide of a probe and the genomic distance is the number of nucleotide bases separating the 5′ most nucleotide of the two probes.

[0113] As stated above, the methods of the invention may be performed using a computer system. An example of a computer system that may be used in connection with any of the embodiments of the invention described herein may include one or more processors and one or more computer-readable non-transitory storage media (e.g., memory and one or more non-volatile storage media). The processor may control writing data to and reading data from the memory and the non-volatile storage device in any suitable manner, as the aspects of the present invention described herein are not limited in this respect. To perform any of the functionality described herein, the processor may execute one or more instructions stored in one or more computer-readable storage media (e.g., the memory), which may serve as non-transitory computer-readable storage media storing instructions for execution by the processor.

[0114] The above-described embodiments of the present invention can be implemented in any of numerous ways. For example, the embodiments may be implemented using hardware, software or a combination thereof. When implemented in software, the software code can be executed on any suitable processor or collection of processors, whether provided in a single computer or distributed among multiple computers. It should be appreciated that any component or collection of components that perform the functions described above can be generically considered as one or more controllers that control the above-discussed functions. The one or more controllers can be implemented in numerous ways, such as with dedicated hardware, or with general purpose hardware (e.g., one or more processors) that is programmed using microcode or software to perform the functions recited above.

[0115] In this respect, it should be appreciated that one implementation comprises at least one non-transitory computer-readable storage medium (e.g., a computer memory, a floppy disk, a compact disk, a tape, etc.) encoded with a computer program (i.e., a plurality of instructions), which, when executed on a processor, performs the above-discussed functions of the embodiments of the present invention. The computer-readable storage medium can be transportable such that the program stored thereon can be loaded onto any computer resource to implement the aspects of the present invention discussed herein. In addition, it should be appreciated that the reference to a computer program which, when executed, performs the above-discussed functions, is not limited to an application program running on a host computer. Rather, the term computer program is used herein in a generic sense to reference any type of computer code (e.g., software or microcode) that can be employed to program a processor to implement the above-discussed aspects of the present invention.

[0116] The following Examples are included for purposes of illustration and are not intended to limit the scope of the invention.

### EXAMPLES

### Example 1

### Materials

### Cells and Tissues

[0117] hTERT-HME1 mammary epithelium cells were kindly provided by R. Weinberg (MIT) and grown in the MEGM medium from LONZA (#CC-3151). Metaphase spreads derived from human lymphocytes were obtained from Abbott Diagnostics (#30-806010). For HER2 RNA-DNA FISH in breast cancer, HER2 IHC control tissue arrays with ten cores mounted on #1 coverglasses coated with poly-L-lysine were purchased from US Biomax. After deparaffinization in D-Limonene (VWR), tissue sections were re-hydrated, post-fixed 10 min in 4% paraformaldehyde in 1×PBS solution, heated 45 min at 80° C. in 0.01M sodium citrate pH 6, and then treated with 0.025% pepsin (Sigma) in 0.01M HCl. Auto-fluorescence was reduced by immersing tissue sections in NaBH₄ 1% in 1×PBS solution for 10 min at room temperature. After three washes 10 min each in RNAse-free water, samples were stored in 2×SSC buffer supplemented with Ribonucleoside Vanadyl Complex (see below) at 4° C. until hybridization was performed.

### PCR Reagents

[0118] Primers for PCR were purchased from Integrated DNA Technologies (IDT) in 96-well plates at 100 μM concentration in RNAse-free water. KAPA SYBR FAST qPCR Master Mix 2× was from KAPABiosystems. Human male genomic DNA (Promega #G1471) was used as template.

### FISH Reagents

[0119] Reagents for FISH were purchased from the following companies. Formamide (#AM9342), 20×SSC (#AM9765), 1M Tris, 10×PBS, 5% BSA (#AM2616), RNAseZAP (#AM9780M), RNAsin (#N2615), and SUPERasin (#AM2696) were from Ambion. Protector was from ROCHE (#03335399001). 100×Denhardt's solution was obtained from Amresco (#E257). The following reagents were obtained from Sigma: Catalase (#3515), Glucose Oxidase (#G2133), Trolox (#238813), Igepal (#CA-630), Dextran sulfate (#D8906), E. coli tRNA (#R4251), and 20 mg/mL Glycogen (#G1767). Tween20 and Triton X-100 were from Promega (#H5151 and #H5141, respectively). RNAseA 100 mg/mL was from Qiagen. 1N HCl was from EMS (#16770). Fixogum was from Kreatech (#LK-071). Ribonucleoside Vanadyl Complex (RVC) was from NEB (# S1402S). Human Cot-1 DNA was from Invitrogen (#15279-011).

[0120] HD-FISH hybridization buffer for metaphase spreads contained 1.7×SSC, 50% formamide, 50 mM Na2HPO4/NaH2PO4, 10% dextran sulfate, and 5×Denhardt's solution pH 7.5.

HD-FISH hybridization buffer for interphase cells contained 1.7×SSC, 70% formamide, 50 mM Na2HPO4/NaH2PO4, 10% dextran sulfate, and 5×Denhardt's solution pH 7.5.

[0121] RNA FISH hybridization buffer consisted of 25% formamide, 2×SSC, 10% dextran sulfate, 1 mg/ml E. coli tRNA, 0.2% BSA, and 20 mM RVC.

[0122] The HER2 RNA FISH probe consisted of 48 different 20nt-long oligonucleotide sequences, each having the 3′ covalently bound to an amino group and purchased from Biosearch Technologies. The probe was coupled to AlexaFluor594 (Invitrogen) as previously described.

For microscopy, samples were covered with a mounting solution containing 2×SSC buffer, 10 mM Tris, 0.4% glucose, Catalase, 37 μg/mL Glucose Oxidase, and 2 mM Trolox.

### Methods

### Synthesis of HD-FISH Probes by PCR

[0123] For each probe, forward and reverse primers were synthesized in corresponding wells of separate 96-well plates (stock plates). Forward and reverse primer pairs were mixed and diluted at 5 μM in TE buffer pH 8 using clear real-time PCR plates (clear LightCycler 480 Multiwell Plate 96, Roche) (dilution plates) at well positions matching the position of primers in the stock plate. For each probe, real-time PCR reactions were carried out in the same type of plates (experimental plates), by transferring the appropriate volume of 5 μM primer dilution from the dilution plate to the corresponding well in the experimental plate. For each reaction (in one well), the following volumes were used:

| REAGENT | VOLUME (μL) |
|---|---|
| KAPA SYBR FAST qPCR Master Mix 2x | 25 |
| 5 μM Forward + Reverse primers dilution | 4 |
| Human male genomic DNA (diluted at 100 ng/μL in TE | 1 |
| buffer pH 8) | |
| Nuclease-free water | 20 |

[0124] For each plate, real-time PCR reactions were performed in a LightCycler® 480 instrument (Roche) according to the following program:

| CYCLE | STEP | TEMP. | TIME | ACQUISITION MODE |
|---|---|---|---|---|
| Pre-amplification | 1 | 95° C. | 5 min | None |
| Amplification | 1 | 95° C. | 10 sec | None |
| | 2 | 55° C. | 10 sec | None |
| | 3 | 72° C. | 10 sec | Single |
| Cooling | 1 | 40° C. | 10 sec | None |

[0125] Amplification through steps 1-3 was repeated 30 times. After PCR, the contents of all wells corresponding to a given probe were pooled together in a sterile cell culture basin (VWR), and aliquoted into 1.5 mL tubes for subsequent ethanol precipitation. Wells in which either no product was observed or in which the amplification kinetics was significantly different than in all other wells were excluded. Ethanol precipitation was carried out by adding 3M sodium acetate pH 5.5 to PCR aliquots at 10% vol./vol. ratio, followed by addition of 2.5 volumes of 100% ice-cold ethanol and incubation overnight at −20° C. The next day, DNA pellets were washed twice in 70% ice-cold ethanol, air-dried for 20 min, and re-dissolved in nuclease-free water. DNA concentration was measured using Nanodrop.

### HD-FISH Probes Labeling

[0126] For each probe, a volume corresponding to 1 μg was lyophilized in a 1.5 mL tube, and then labeled with the fluorophore of interest using the corresponding ULYSIS Nucleic Acid Labeling Kit (Invitrogen) according to the manufacturer's instructions. Unbound dyes were removed by gel filtration using one KREApure column per probe following the manufacturer's instructions (Kreatech). Labeled probes were stored at −20° C., and were stable at this temperature up to six months.

### Preparation of HD-FISH Hybridization Solution

[0127] 200 ng (in case of HER2 probes) or 20 ng (in case of spotting probes simultaneously targeting 10 different loci on chromosome 17) of probe were precipitated using the following protocol:

| | | | Nuclease- | | Ethanol |
|---|---|---|---|---|---|
| PROBE | Cot1 DNA | Glycogen | free water | Na-acetate | 100% |
| 200/20 ng | 2.5 μg | 20 μg | Up to 100 μL | 11 μL | 300 μL |

[0128] The mix was incubated 2 h at −20° C., then DNA pellets were washed twice in 70% ice-cold ethanol, air-dried for 20 min, and re-dissolved in 20 μL (in case of cells) or 30 μL (in case of breast cancer tissue) of the appropriate hybridization buffer. The hybridization solution was incubated at 55° C. for 1 h while moderately shaking to facilitate solubilization of DNA.

HD-FISH on Metaphase Spreads Metaphase spread slides were denatured for 5 min at 75° C. in a solution containing 70% formamide and 2×SSC pH 7. Afterwards, the slides were immersed in 70% ethanol at room temperature for 2 min, followed by the same treatment in 80% and 100% ethanol. The slides were then air-dried for 20 min. Meanwhile, the desired probe was denatured at 75° C. for 5 min, after which it was applied on dry slides and sealed with Fixogum. The slides were then incubated at 37° C. for 24 h. After hybridization Fixogum was removed and the slides were washed first in 0.4×SSC with 0.3% Igepal at 73° C. for 2 min, and then in 2×SSC with 0.1% Igepal for 1 min at room temperature. Finally slides were transferred into 2×SSC buffer supplemented with 100 ng/mL DAPI, and incubated for 5 min at room temperature. Afterwards the slides were rinsed in 2×SSC and covered with mounting solution before imaging.

### 3D HD-FISH on Interphase Nuclei

[0129] hTERT-HME1 cells were plated at a density of 10⁶ cells per one 10 cm culture dish in MEGM medium. Every dish contained 5 22×22 mm sterilized #1 coverglasses coated with 0.2% gelatin. Two days after plating, when cells reached a confluency of approx. 90-100%, they were processed as follows: dishes were rinsed with 1×PBS and incubated with 0.3×PBS for 1 min at room temperature. Afterwards cells were fixed in 4% formalin in 0.3×PBS for 10 min at room temperature, washed 3 times with 1×PBS containing 0.05% Triton X-100, and permeabilized with 1×PBS containing 0.5% Triton X-100 for 20 min at room temperature. After that, cells were rinsed with 20% glycerol in 1×PBS and incubated in 20% glycerol in 1×PBS overnight. The next day all coverglasses were individually subjected to 6 freeze-thaw cycles in liquid nitrogen (25 sec in liquid nitrogen, followed by gradual de-frosting, followed by approx. 2 min in glycerol solution before the next cycle). Coverglasses were washed 3 times with 1×PBS containing 0.05% Triton X-100, and then incubated in 0.1N HCl solution for 5 min at room temperature. Afterwards coverglasses were washes twice with 1×PBS containing 0.05% Triton X-100, once with 2×SSC, then rinsed in 2×SSC buffer with 50% formamide pH 7.0, and finally incubated in the same solution overnight. After this preparation, coverglasses were stored at 4° C. for 3 days up to two months and used for hybridization whenever needed.

[0130] Coverglasses stored in 2×SSC buffer with 50% formamide pH 7 at 4° C. were gradually allowed to reach room temperature before applying a probe onto them. 20 μL of the desired hybridization solution were applied onto a microscope slide, covered with the coverglass coated with cells, and sealed with Fixogum. After Fixogum had solidified, slides were hybridized for 3-5 min at 75° C. (coverglasses that had been stored in 2×SSC 50% formamide for less than a month were denatured for 5 min, whereas those kept longer were denatured for 3 min). Hybridization was allowed to proceed at 37° C. for 24 h in a humidity chamber.

[0131] After hybridization coverglasses were removed from slides and washed as follows: they were rinsed in 2×SSC and washed twice in 0.2×SSC with 0.2% Tween20 at 56° C. for 7 min each. Then they were rinsed with 4×SSC containing 0.1% Tween20, and incubated in 2×SSC containing 100 ng/mL DAPI for 5 min at room temperature. Samples were covered with mounting solution before imaging.

3D HD-FISH Combined with RNA FISH on Interphase Cells

[0132] All steps until permeabilization (included) were the same as for 3D HD-FISH only (see above). Starting from fixation on, exceptional care was taken in order to avoid RNAse contamination. Hence, all solutions were prepared using RNAse-free water generated by a Barnstead water purification system equipped with the UF filter (ThermoFisher Scientific, #D8611). Whenever available, certified RNAse-free reagents were used. If this was not possible, the RNAse inhibitor RVC was added to a 20 mM final concentration. The Dewar flask in which liquid nitrogen freeze/thaw cycles were performed as well as all the tweezers and microscope slides used were rendered RNAse-free by RNAseZAP treatment prior to use.

[0133] After permeabilization cells were rinsed with 20% glycerol in 1×PBS and incubated in 20% glycerol in 1×PBS for 3 h at room temperature, and then at 4° C. overnight. The next day all coverglasses were subjected to 6 freeze-thaw cycles in liquid nitrogen and processed for HD-FISH as described above.

[0134] After HD-FISH hybridization, microscope slides were immersed in 2×SSC solution supplemented with 20 mM RVC to facilitate Fixogum removal. After being released, coverglasses were transferred onto 100 μL of HER2 RNA FISH hybridization solution dispensed onto a piece of Parafilm, and incubated at 30° C. for 3 h. Afterwards coverglasses were washed twice at 30° C. for 30 min in 25% RNA WASH buffer composed of 2×SSC and 25% formamide (the second wash included 20 ng/mL DAPI). After washes, coverglasses were rinsed with 2×SSC and covered with mounting solution before imaging.

HD-FISH Combined with RNA FISH on Breast Cancer Tissue Arrays

[0135] Coverglasses coated with breast cancer tissue arrays in 2×SSC solution with 20 mM RVC stored at 4° C. (see above) were allowed to gradually reach room temperature, and then were transferred into 2×SSC with 50% formamide pH 7, and incubated overnight at room temperature. The next day coverglasses were placed onto 30 μL of hybridization solution containing 200 ng of 50 kb HER2 probe together with 1 μL of Protector solution. Coverglasses were sealed with Fixogum and placed at 37° C. for 3 h before being denatured in order for the probe to fully penetrate the tissue. Samples were then denatured at 85° C. for 5 min and hybridization was carried on for 40 h at 37° C. in a humidity chamber. All steps afterwards were identical to those for 3D HD-FISH combined with RNA FISH on interphase cells (see above).

### Results

[0136] We have developed a high-definition DNA Fluorescent In Situ Hybridization (HD-FISH) method, which is based on rapid and cost-effective PCR-based synthesis of genome-wide probe libraries. Using a custom-made algorithm, we have compiled a list of PCR primer pairs with optimal sequence and thermodynamic properties along the entire human genome. For a given region of interest, a set of 10-60 such primer pairs is selected, synthesized in 96-well plates, and used to generate ˜200 bp-long unique DNA fragments by real-time PCR. These fragments are subsequently pooled, purified, and may be fluorescently labeled en mass using for example the Universal Linkage System chemistry (ULS™, Kreatech), thus finally serving as a ready-to-use HD-FISH probe (FIG. 1A). Optionally, either forward or reverse primers can be synthesized with a 5′-biotin group, allowing the synthesis of strand-specific, single-stranded probes (FIG. 1B).

[0137] In pilot experiments, we have tested our probe design and synthesis method by constructing probes targeting the 40 kb ERBB2/HER2 locus on human chromosome 17. This locus is amplified in 25-30% of all ductal invasive breast adenocarcinomas, and DNA FISH is the recommended method to assess the HER2 copy number in tumors scored 1-2+ in immunohistochemistry⁶. While a commercially available probe typically yields patchy signals difficult to automatically identify, both single- and double-stranded probes prepared with our method produce bright, punctuated signals that can be easily identified and automatically counted in interphase nuclei (FIG. 2A). The positions of these signals can also be precisely determined, in contrast to the patchy signals observed with traditional DNA FISH probes. Notably, using a probe consisting of only ten 200 bp-long fragments targeting a region as short as 3 kb, a diffraction-limited fluorescent signal can be obtained (FIG. 2B). Diffraction-limited fluorescent signals appear as small (˜350 nm in diameter), discrete spots by high-resolution bright-field or confocal microscopy. These signals are optimally suited for automatic image processing as they can be described with relatively simple mathematical functions. The probes used for the 3 kb experiments were generated using the HER2 3 kb primer set provided herein.

[0138] We have also analyzed whether the methods set forth herein can be used to prepare chromosome paint probes. Chromosome paint probes are specific for either entire chromosomes or parts thereof (e.g., the p or q arm). Such probes are difficult to produce and expensive to purchase. These probes hold important biomedical applications, such as in the diagnosis of pathologic chromosome number aberrations (e.g. X monosomy in Turner's syndrome or 21 trisomy in Down's syndrome). In principle, using our method, a set of chromosome-specific “spotting probes” can be rapidly synthesized, and used to visualize a chromosome territory in interphase nuclei as a “cloud” of dots. To test the feasibility of this idea, we generated probes targeting ten genes on chromosome 17, separated by approximately 8 Mb and labeled with the same fluorophore. After mixing all the probes and using the pool for HD-FISH, computationally identifiable spot clusters, each marking one chromosomal territory, could be detected (FIG. 3).

[0139] In conclusion, compared to traditional DNA FISH which is based on laborious and time-consuming preparation of probes from bacterial artificial chromosomes (BACs) or laser-captured chromosome fragments, our method allows for streamlined and cost-effective preparation of probes. The preparation of a chromosome spotting probe useful for over 100 tests, and consisting of a mix of 10 different gene-targeting probes, requires 1.5 working days and less than 2000 $ for primer synthesis. Moreover, unlike traditional FISH, HD-FISH of the invention yields signals amenable to robust and automated computational processing in a large number of nuclei. Lastly, our method allows systematic visualization of regions as small as 3 kb together with discrimination between the Watson and Crick strands of the double helix. Thus, we envision that our HD-FISH method will have a broad range of applications, including medical diagnostics, single-cell in situ karyotyping, chromatin architecture studies, and analysis of combed DNA.

### Example 2

[0140] A comparison of the method of the invention to a method reported by Navin N., et. al. 2006. Bioinformatics (referred to as the “Prober” method) was performed. In the comparison, primer sets for 10 randomly-selected 100 kb regions of chromosome 17 generated using Prober and the methods of the invention were compared.

[0141] The Prober software was used to design primer pairs with relaxed constraints, relative to the default settings and compared to the examples that accompanied the Navin et al. published reference. The following settings were relaxed (1) mer.count.cutoff=2 (default=1), (2) Max Repeats=5 (default=4), (3) Minimum Melting Temperature=55 (instead of 60), and (4) Maximum Melting Temperature=80 (instead of 75). The final Prober probe lengths were constrained to between 200-1,000 bp. This is significantly higher than the relatively uniform length distribution imposed upon the probe set of the invention which in this examples was 200-220 bp.

[0142] According to the Navin et al. published reference, the final probe set must cover at least 20% of the target sequence. However, none of the 10 regions tested produced Prober sets with enough probes to satisfy the minimum quality cutoff. The total number of probes ranged from 0 to 37, with the total coverage between 0-18%. In contrast, using the method of the invention, all ten regions had numerous 200 bp probes. Our totals ranged between 169 and 251 probes, with coverage of the target regions of about 35-53%. Table 3 provides the raw data of this comparative study.

TABLE 3

| | | Percent | | |
|---|---|---|---|---|
| | Total Probes | Coverage | Total Probes | Percent Coverage |
| Location | (PROBER) | (PROBER) | (Invention) | (Invention) |
| 5 mb | 22 | 10.9 | 239 | 49.8 |
| 14 mb | 0 | 0 | 183 | 38.2 |
| 21 mb | 31 | 13.6 | 192 | 40.1 |
| 29 mb | 17 | 7.4 | 171 | 35.6 |
| 37 mb | 15 | 6.2 | 206 | 43 |
| 46 mb | 8 | 3.6 | 185 | 38.6 |
| 53 mb | 3 | 1.7 | 226 | 47.1 |
| 62 mb | 15 | 7 | 194 | 40.1 |
| 70 mb | 9 | 3.5 | 251 | 52.5 |
| 78 mb | 37 | 17.5 | 169 | 35.2 |

[0143] Even more significantly, requiring a uniform probe size of 200-300 bp (still broader than our imposed length range) results in complete failure of the Prober software to generate any probes.

[0144] Accordingly, the Prober software and method is not able to generate, inter alia, a set of FISH PCR-based probes that are under 1 kb in length, including probes ranging in length from about 70 bp to about 300 bp and uniform probes in that range (e.g., about 200 base pairs) that can be applied to genomic DNA regions of 10 kb or more.

### REFERENCES

[0145] 1. South, S. T., Chen, Z. & Brothman, A. R. Genomic medicine in prenatal diagnosis. Clin Obstet Gynecol 51, 62-73 (2008).
[0146] 2. Sreekantaiah, C. FISH panels for hematologic malignancies. Cytogenet Genome Res 118, 284-96 (2007).
[0147] 3. Cremer, T. & Cremer, M. Chromosome territories. Cold Spring Harb Perspect Biol 2, a003889.
[0148] 4. Hubner, M. R. & Spector, D. L. Chromatin dynamics. Annu Rev Biophys 39, 471-89.
[0149] 5. Takizawa, T., Meaburn, K. J. & Misteli, T. The meaning of gene positioning. Cell 135, 9-13 (2008).
[0150] 6. Clinical laboratory assays for HER-2/neu amplification and overexpression: quality assurance, standardization, and proficiency testing. Arch Pathol Lab Med 126, 803-8 (2002).
[0151] 7. Raj, A., van den Bogaard, P., Rifkin, S. A., van Oudenaarden, A. & Tyagi, S. Imaging individual mRNA molecules using multiple singly labeled probes. Nat Methods 5, 877-9 (2008).

### EQUIVALENTS

[0152] While several inventive embodiments have been described and illustrated herein, those of ordinary skill in the art will readily envision a variety of other means and/or structures for performing the function and/or obtaining the results and/or one or more of the advantages described herein, and each of such variations and/or modifications is deemed to be within the scope of the inventive embodiments described herein. More generally, those skilled in the art will readily appreciate that all parameters, dimensions, materials, and configurations described herein are meant to be exemplary and that the actual parameters, dimensions, materials, and/or configurations will depend upon the specific application or applications for which the inventive teachings is/are used. Those skilled in the art will recognize, or be able to ascertain using no more than routine experimentation, many equivalents to the specific inventive embodiments described herein. It is, therefore, to be understood that the foregoing embodiments are presented by way of example only and that, within the scope of the appended claims and equivalents thereto, inventive embodiments may be practiced otherwise than as specifically described and claimed. Inventive embodiments of the present disclosure are directed to each individual feature, system, article, material, kit, and/or method described herein. In addition, any combination of two or more such features, systems, articles, materials, kits, and/or methods, if such features, systems, articles, materials, kits, and/or methods are not mutually inconsistent, is included within the inventive scope of the present disclosure.

[0153] All definitions, as defined and used herein, should be understood to control over dictionary definitions, definitions in documents incorporated by reference, and/or ordinary meanings of the defined terms.

[0154] All references, patents and patent applications disclosed herein are incorporated by reference with respect to the subject matter for which each is cited, which in some cases may encompass the entirety of the document.

[0155] The indefinite articles “a” and “an,” as used herein in the specification and in the claims, unless clearly indicated to the contrary, should be understood to mean “at least one.”

[0156] The phrase “and/or,” as used herein in the specification and in the claims, should be understood to mean “either or both” of the elements so conjoined, i.e., elements that are conjunctively present in some cases and disjunctively present in other cases. Multiple elements listed with “and/or” should be construed in the same fashion, i.e., “one or more” of the elements so conjoined. Other elements may optionally be present other than the elements specifically identified by the “and/or” clause, whether related or unrelated to those elements specifically identified. Thus, as a non-limiting example, a reference to “A and/or B”, when used in conjunction with open-ended language such as “comprising” can refer, in one embodiment, to A only (optionally including elements other than B); in another embodiment, to B only (optionally including elements other than A); in yet another embodiment, to both A and B (optionally including other elements); etc.

[0157] As used herein in the specification and in the claims, “or” should be understood to have the same meaning as “and/or” as defined above. For example, when separating items in a list, “or” or “and/or” shall be interpreted as being inclusive, i.e., the inclusion of at least one, but also including more than one, of a number or list of elements, and, optionally, additional unlisted items. Only terms clearly indicated to the contrary, such as “only one of” or “exactly one of,” or, when used in the claims, “consisting of,” will refer to the inclusion of exactly one element of a number or list of elements. In general, the term “or” as used herein shall only be interpreted as indicating exclusive alternatives (i.e. “one or the other but not both”) when preceded by terms of exclusivity, such as “either,” “one of,” “only one of,” or “exactly one of.” “Consisting essentially of,” when used in the claims, shall have its ordinary meaning as used in the field of patent law.

[0158] As used herein in the specification and in the claims, the phrase “at least one,” in reference to a list of one or more elements, should be understood to mean at least one element selected from any one or more of the elements in the list of elements, but not necessarily including at least one of each and every element specifically listed within the list of elements and not excluding any combinations of elements in the list of elements. This definition also allows that elements may optionally be present other than the elements specifically identified within the list of elements to which the phrase “at least one” refers, whether related or unrelated to those elements specifically identified. Thus, as a non-limiting example, “at least one of A and B” (or, equivalently, “at least one of A or B,” or, equivalently “at least one of A and/or B”) can refer, in one embodiment, to at least one, optionally including more than one, A, with no B present (and optionally including elements other than B); in another embodiment, to at least one, optionally including more than one, B, with no A present (and optionally including elements other than A); in yet another embodiment, to at least one, optionally including more than one, A, and at least one, optionally including more than one, B (and optionally including other elements); etc.

[0159] It should also be understood that, unless clearly indicated to the contrary, in any methods claimed herein that include more than one step or act, the order of the steps or acts of the method is not necessarily limited to the order in which the steps or acts of the method are recited.

[0160] In the claims, as well as in the specification above, all transitional phrases such as “comprising,” “including,” “carrying,” “having,” “containing,” “involving,” “holding,” “composed of,” and the like are to be understood to be open-ended, i.e., to mean including but not limited to. Only the transitional phrases “consisting of” and “consisting essentially of” shall be closed or semi-closed transitional phrases, respectively, as set forth in the United States Patent Office Manual of Patent Examining Procedures, Section 2111.03.

[0161] The patent application contains at least one drawing executed in color. Copies of this patent application publication with color drawing(s) will be provided by the Office upon request and payment of the necessary fee.

1. A method comprising
(a) identifying a plurality of nucleic acids, each having a nucleotide sequence that is unique relative to known sequence of genomic DNA of a species,
(b) identifying, from each unique nucleic acid identified in (a), 30-300 bp nucleic acid fragments and amplification primer pairs that yield 70-300 base pair nucleic acid fragments, thereby generating a putative probe set and a putative primer set,
(c) eliminating, from the putative probe set, nucleic acids having amplification primer pairs that amplify more than one nucleic acid fragment in genomic DNA of the species, and optionally eliminating, from the putative primer set, amplification primer pairs that amplify more than one nucleic acid fragment in genomic DNA of the species, and
(d) eliminating, from the putative probe set, nucleic acid fragments that hybridize to other regions in the genomic DNA of the species, and optionally eliminating, from the putative primer set, amplification primer pairs that amplify such nucleic acid fragments,
thereby producing an HD-FISH probe set and/or an HD-FISH primer set.

2. The method of claim 1, wherein step (a) is performed by analyzing a plurality of overlapping nucleic acid sequences along a chromosome.

3. The method of claim 2, wherein each of the overlapping nucleic acid sequences is about 500 bases in length.

4. The method of any one of the foregoing claims, wherein the species is human.

5. The method of any one of the foregoing claims, wherein step (a) is performed in silico.

6. The method of any one of the foregoing claims, wherein step (c) is performed in silico.

7. The method of any one of the foregoing claims, wherein step (d) is performed in silico.

8. The method of any one of the foregoing claims, wherein step (d) is more stringent than step (a).

9. The method of any one of the foregoing claims, wherein the HD-FISH probe set comprises one or more subsets of 50 or more probes that bind to single 100 kb regions of sequenced human genomic DNA.

10. The method of any one of the foregoing claims, wherein the HD-FISH probe set comprises multiple subsets of 50 or more probes that bind to 93% of 100 kb regions of sequenced human genomic DNA.

11. The method of any one of the foregoing claims, wherein the HD-FISH probe set comprises probes that are about 40-300 bases in length.

12. The method of any one of the foregoing claims wherein step (c) is performed before step (d).

13. The method of any one of the foregoing claims wherein step (d) is performed before step (c).

14. The method of any one of the foregoing claims, further comprising synthesizing one or more subsets of probes within the HD-FISH probe set using an amplification reaction.

15. The method of claim 14, wherein the amplification reaction is a PCR reaction.

16. The method of any one of claims 1-13, further comprising synthesizing one or more subsets of probes directly.

17. A composition comprising
an HD-FISH probe set that comprises multiple probe subsets each comprising 50 or more probes that in total hybridize to 93% of discrete 100 kb regions of sequenced human genomic DNA.

18. The composition of claim 17, wherein the HD-FISH probe set comprises probes that are about 30-300 bases in length, about 40-300 bases in length, or about 70-300 bases in length.

19. The composition of claim 17 or 18, wherein probes within the HD-FISH probe set are fluorescently labeled.

20. The composition of claim 17, 18 or 19, wherein the HD-FISH probe set is produced by performing a polymerase chain reaction on genomic DNA in the presence of an HD-FISH primer set.

21. The composition of claim 20, wherein probes within the HD-FISH probe set are uniformly fluorescently labeled.

22. The composition of claim 19, 20 or 21, wherein probes within the HD-FISH probe set are fluorescently 5′ end-labeled.

23. The composition of any one of claims 17-22, wherein the probes are single-stranded.

24. A composition comprising an HD-FISH probe set produced according to the method of any one of claims 1-16.

25. A composition comprising
an HD-FISH primer set that amplifies an HD-FISH probe set comprising one or more primer pair subsets each having 50 or more probes that together hybridize to 93% of discrete 100 kb regions of sequenced human genomic DNA.

26. A composition comprising an HD-FISH primer set identified according to the method of any one of claims 1-13 and produced using an enzyme-dependent or an enzyme-independent process.

27. The composition of claim 25 or 26, wherein probes within the HD-FISH probe set are fluorescently labeled.

28. The composition of claim 27, wherein probes within the HD-FISH probe set are uniformly fluorescently labeled.

29. A method comprising
performing a fluorescent in situ hybridization (FISH) reaction in the presence of an HD-FISH probe set, or a subset thereof, that hybridizes to a 10 kb region of interest, wherein the probes are about 30 to about 300 bases in length, and wherein a FISH result that differs from a control indicates a chromosomal abnormality, wherein the reaction is performed in more than 50% formamide (v/v).

30. The method of claim 29, wherein the reaction is performed in more than 60% formamide (v/v).

31. The method of claim 29, wherein the reaction is performed in more than 70% formamide (v/v).

32. The method of claim 29, 30 or 31, wherein the probes are about 40-300 bases in length.

33. The method of claim 29, 30 or 31, wherein the probes are about 40, about 50, about 60, about 70, about 80, about 90, or about 100 bases in length.

34. A method comprising
performing a fluorescent in situ hybridization (FISH) reaction in the presence of an HD-FISH probe set, or a subset thereof, that hybridizes to a 3 kb region of interest, wherein the probes are about 70 to about 300 bases in length, and wherein a FISH result that differs from a control indicates a chromosomal abnormality.

35. The method of any one of claims 29-34, wherein the HD-FISH probe set or subset thereof comprises 5-30 probes.

36. The method of any one of claims 29-34, wherein the HD-FISH probe set or subset thereof comprises 10 probes.

37. The method of any one of claims 29-36, further comprising synthesizing the HD-FISH probe set or a subset thereof using an amplification method.

38. The method of claim 37, wherein the amplification method is a PCR amplification.

39. The method of claim any one of claims 29-36, further comprising directly synthesizing the HD-FISH probe set or a subset thereof.

The application's sequence listing, which the Patent Office published only in electronic form, follows.

SEQUENCE LISTING (28384 sequences)

SEQ ID NO: 1 - DNA, 21 bp, Artificial Sequence
  Abl1 Forward Primer
aagaccatcagcgtttccttt

SEQ ID NO: 2 - DNA, 20 bp, Artificial Sequence
  Abl1 Forward Primer
ttgctgacttgtggagatgc

SEQ ID NO: 3 - DNA, 20 bp, Artificial Sequence
  Abl1 Forward Primer
gcgacagttccttccaattc

SEQ ID NO: 4 - DNA, 20 bp, Artificial Sequence
  Abl1 Forward Primer
gaagtcgtgggctcttctga

SEQ ID NO: 5 - DNA, 20 bp, Artificial Sequence
  Abl1 Forward Primer
gaatgctgcccgtacatttt

SEQ ID NO: 6 - DNA, 20 bp, Artificial Sequence
  Abl1 Forward Primer
taccccaacattgggtgact

SEQ ID NO: 7 - DNA, 20 bp, Artificial Sequence
  Abl1 Forward Primer
gttccctgtgtgtccctgat

SEQ ID NO: 8 - DNA, 20 bp, Artificial Sequence
  Abl1 Forward Primer
tgcgatctttcataggctga

SEQ ID NO: 9 - DNA, 20 bp, Artificial Sequence
  Abl1 Forward Primer
agagaaggggacagggaatg

SEQ ID NO: 10 - DNA, 20 bp, Artificial Sequence
  Abl1 Forward Primer
ttattggcccatttcaagga

SEQ ID NO: 11 - DNA, 20 bp, Artificial Sequence
  Abl1 Forward Primer
cagaagtttcaattgtgggg

SEQ ID NO: 12 - DNA, 20 bp, Artificial Sequence
  Abl1 Forward Primer
aacccataggaatgtgtcgg

SEQ ID NO: 13 - DNA, 20 bp, Artificial Sequence
  Abl1 Forward Primer
tatgccagacatgtgggtgt

SEQ ID NO: 14 - DNA, 20 bp, Artificial Sequence
  Abl1 Forward Primer
tctctccaccctggatgaac

SEQ ID NO: 15 - DNA, 20 bp, Artificial Sequence
  Abl1 Forward Primer
ctacctgcctcagcatcctc

SEQ ID NO: 16 - DNA, 20 bp, Artificial Sequence
  Abl1 Forward Primer
ttttctgtgtaggggcgaag

SEQ ID NO: 17 - DNA, 20 bp, Artificial Sequence
  Abl1 Forward Primer
tcagcttccatacccaaaca

SEQ ID NO: 18 - DNA, 20 bp, Artificial Sequence
  Abl1 Forward Primer
acttgtttggcaggttcagg

SEQ ID NO: 19 - DNA, 20 bp, Artificial Sequence
  Abl1 Forward Primer
ctgtggcctctcaccaaatc

SEQ ID NO: 20 - DNA, 20 bp, Artificial Sequence
  Abl1 Forward Primer
tcccacgcattttaggatgt

SEQ ID NO: 21 - DNA, 20 bp, Artificial Sequence
  Abl1 Forward Primer
tggcttagttggatcttggg

SEQ ID NO: 22 - DNA, 20 bp, Artificial Sequence
  Abl1 Forward Primer
tgccactctgtccttttcct

SEQ ID NO: 23 - DNA, 20 bp, Artificial Sequence
  Abl1 Forward Primer
ttggttttccaaccagttcc

SEQ ID NO: 24 - DNA, 21 bp, Artificial Sequence
  Abl1 Forward Primer
tggagaaaaaccttcaggaaa

SEQ ID NO: 25 - DNA, 20 bp, Artificial Sequence
  Abl1 Forward Primer
gcttgctgaggagtttccag

SEQ ID NO: 26 - DNA, 20 bp, Artificial Sequence
  Abl1 Forward Primer
gcctggaaaaaggggtaaag

SEQ ID NO: 27 - DNA, 20 bp, Artificial Sequence
  Abl1 Forward Primer
gtgccctaactgtggtggat

SEQ ID NO: 28 - DNA, 21 bp, Artificial Sequence
  Abl1 Forward Primer
gctagactccaggtttcgtca

SEQ ID NO: 29 - DNA, 26 bp, Artificial Sequence
  Abl1 Forward Primer
gaagatgaaataaattgcattgtaaa

SEQ ID NO: 30 - DNA, 20 bp, Artificial Sequence
  Abl1 Forward Primer
gtttaaagggagcaggcaca

SEQ ID NO: 31 - DNA, 20 bp, Artificial Sequence
  Abl1 Forward Primer
gctggcctgcataatagagc

SEQ ID NO: 32 - DNA, 20 bp, Artificial Sequence
  Abl1 Forward Primer
tctttgaaatgcatgtggga

SEQ ID NO: 33 - DNA, 20 bp, Artificial Sequence
  Abl1 Forward Primer
aggagctgttatcccttgcc

SEQ ID NO: 34 - DNA, 20 bp, Artificial Sequence
  Abl1 Forward Primer
agccatgacccgaagtatga

SEQ ID NO: 35 - DNA, 20 bp, Artificial Sequence
  Abl1 Forward Primer
tgttcagaaaggcaatgcag

SEQ ID NO: 36 - DNA, 20 bp, Artificial Sequence
  Abl1 Forward Primer
gttgtcagtcgtacgggctt

SEQ ID NO: 37 - DNA, 20 bp, Artificial Sequence
  Abl1 Forward Primer
caaagccttactgctcctgg

SEQ ID NO: 38 - DNA, 20 bp, Artificial Sequence
  Abl1 Forward Primer
ttttcagcctccgcactatt

SEQ ID NO: 39 - DNA, 20 bp, Artificial Sequence
  Abl1 Forward Primer
ctgttgtgagatcttgggca

SEQ ID NO: 40 - DNA, 20 bp, Artificial Sequence
  Abl1 Forward Primer
tcaccctacactgctttgga

SEQ ID NO: 41 - DNA, 20 bp, Artificial Sequence
  Abl1 Forward Primer
atattcaggtgggaaagggc

SEQ ID NO: 42 - DNA, 27 bp, Artificial Sequence
  Abl1 Forward Primer
tgaaggaatttgttaaaatatcagagc

SEQ ID NO: 43 - DNA, 20 bp, Artificial Sequence
  Abl1 Forward Primer
agaaggtgaggctttgcttg

SEQ ID NO: 44 - DNA, 20 bp, Artificial Sequence
  Abl1 Forward Primer
ttttgaccaattcccctctg

SEQ ID NO: 45 - DNA, 20 bp, Artificial Sequence
  Abl1 Forward Primer
tctgtgagaaaaggggcaac

SEQ ID NO: 46 - DNA, 20 bp, Artificial Sequence
  Abl1 Forward Primer
tttcccacacactgttgcag

SEQ ID NO: 47 - DNA, 20 bp, Artificial Sequence
  Abl1 Forward Primer
tgttgttgctccttgctgag

SEQ ID NO: 48 - DNA, 20 bp, Artificial Sequence
  Abl1 Forward Primer
gaatccttcaagccctcctc

SEQ ID NO: 49 - DNA, 20 bp, Artificial Sequence
  Abl1 Forward Primer
tgtggctagtccccttatgc

SEQ ID NO: 50 - DNA, 21 bp, Artificial Sequence
  Abl1 Forward Primer
gctactgtccccctgatcatt

SEQ ID NO: 51 - DNA, 21 bp, Artificial Sequence
  Abl1 Forward Primer
tgaaggaaaggtccctctttt

SEQ ID NO: 52 - DNA, 22 bp, Artificial Sequence
  Abl1 Forward Primer
tctttcaggaatgcaaatgaga

SEQ ID NO: 53 - DNA, 20 bp, Artificial Sequence
  Abl1 Forward Primer
tccaagtgaagtgaccccat

SEQ ID NO: 54 - DNA, 20 bp, Artificial Sequence
  Abl1 Forward Primer
tgttggttccccagtctacc

SEQ ID NO: 55 - DNA, 20 bp, Artificial Sequence
  Abl1 Forward Primer
taggaaggtcctgagtggga

SEQ ID NO: 56 - DNA, 20 bp, Artificial Sequence
  Abl1 Forward Primer
agctctggtcctgttggttg

SEQ ID NO: 57 - DNA, 20 bp, Artificial Sequence
  Abl1 Forward Primer
ttgggtttgctatttttggg

SEQ ID NO: 58 - DNA, 25 bp, Artificial Sequence
  Abl1 Forward Primer
aagtggaatttctacatcaaaagaa

SEQ ID NO: 59 - DNA, 20 bp, Artificial Sequence
  Abl1 Forward Primer
cagttccctttgctgctttc

SEQ ID NO: 60 - DNA, 20 bp, Artificial Sequence
  Abl1 Forward Primer
gttggtgcgctctcaagaat

SEQ ID NO: 61 - DNA, 20 bp, Artificial Sequence
  Abl1 Forward Primer
gtaaacatgcagtgaagggc

SEQ ID NO: 62 - DNA, 20 bp, Artificial Sequence
  Abl1 Forward Primer
tgccaccctctagctttcat

SEQ ID NO: 63 - DNA, 20 bp, Artificial Sequence
  Abl1 Forward Primer
tttccctctcgaatttccct

SEQ ID NO: 64 - DNA, 19 bp, Artificial Sequence
  Abl1 Forward Primer
ccggcctgacctcatattt

SEQ ID NO: 65 - DNA, 20 bp, Artificial Sequence
  Abl1 Forward Primer
tgggaattctgcacaacaaa

SEQ ID NO: 66 - DNA, 20 bp, Artificial Sequence
  Abl1 Forward Primer
ccaacccccatacactccta

SEQ ID NO: 67 - DNA, 20 bp, Artificial Sequence
  Abl1 Forward Primer
tgtcactggcaagagcaaag

SEQ ID NO: 68 - DNA, 20 bp, Artificial Sequence
  Abl1 Forward Primer
ctgtctgaccctgtctgctg

SEQ ID NO: 69 - DNA, 20 bp, Artificial Sequence
  Abl1 Forward Primer
ttcaatggaaaagcaagggt

SEQ ID NO: 70 - DNA, 20 bp, Artificial Sequence
  Abl1 Forward Primer
ttcccagcctaccccttaac

SEQ ID NO: 71 - DNA, 20 bp, Artificial Sequence
  Abl1 Forward Primer
ttcccacctcagccttctaa

SEQ ID NO: 72 - DNA, 20 bp, Artificial Sequence
  Abl1 Forward Primer
gcttatcaattcccttgcca

SEQ ID NO: 73 - DNA, 20 bp, Artificial Sequence
  Abl1 Forward Primer
gggaaaaagatgggagtggt

SEQ ID NO: 74 - DNA, 20 bp, Artificial Sequence
  Abl1 Forward Primer
ggcttcactgtcgaggattt

SEQ ID NO: 75 - DNA, 21 bp, Artificial Sequence
  Abl1 Forward Primer
tttggtctgcactttgagtga

SEQ ID NO: 76 - DNA, 20 bp, Artificial Sequence
  Abl1 Forward Primer
cttgcatcacagagcaggaa

SEQ ID NO: 77 - DNA, 24 bp, Artificial Sequence
  Abl1 Forward Primer
aactgagggataaagctgaagaaa

SEQ ID NO: 78 - DNA, 20 bp, Artificial Sequence
  Abl1 Forward Primer
gattacctcccaaggaaccc

SEQ ID NO: 79 - DNA, 22 bp, Artificial Sequence
  Abl1 Forward Primer
caaaaaggaagaatgtctgcaa

SEQ ID NO: 80 - DNA, 20 bp, Artificial Sequence
  Abl1 Forward Primer
ggtgaggaggtggagaagtg

SEQ ID NO: 81 - DNA, 20 bp, Artificial Sequence
  Abl1 Forward Primer
tgctcagtccaccatcttga

SEQ ID NO: 82 - DNA, 20 bp, Artificial Sequence
  Abl1 Forward Primer
ccaggtgagtgaaagccaat

SEQ ID NO: 83 - DNA, 20 bp, Artificial Sequence
  Abl1 Forward Primer
ttgacattagggcttgctga

SEQ ID NO: 84 - DNA, 20 bp, Artificial Sequence
  Abl1 Forward Primer
aaacaaggctgctccagaaa

SEQ ID NO: 85 - DNA, 20 bp, Artificial Sequence
  Abl1 Forward Primer
atctccctctctcctctgcc

SEQ ID NO: 86 - DNA, 20 bp, Artificial Sequence
  Abl1 Forward Primer
ttgcctgttgaagaaggtga

SEQ ID NO: 87 - DNA, 20 bp, Artificial Sequence
  Abl1 Forward Primer
ccccaaacagaaacttggaa

SEQ ID NO: 88 - DNA, 20 bp, Artificial Sequence
  Abl1 Forward Primer
ctcccgcaatgtcacaatag

SEQ ID NO: 89 - DNA, 20 bp, Artificial Sequence
  Abl1 Forward Primer
cagatttgccagctgcatta

SEQ ID NO: 90 - DNA, 20 bp, Artificial Sequence
  Abl1 Forward Primer
taaatcctggctttcccctt

SEQ ID NO: 91 - DNA, 20 bp, Artificial Sequence
  Abl1 Forward Primer
ggaattctgttccctgagga

SEQ ID NO: 92 - DNA, 20 bp, Artificial Sequence
  Abl1 Forward Primer
atggattagatggcctgtgg

SEQ ID NO: 93 - DNA, 20 bp, Artificial Sequence
  Abl1 Forward Primer
tattctgataacgggggacc

SEQ ID NO: 94 - DNA, 20 bp, Artificial Sequence
  Abl1 Forward Primer
aagcaaccaagaaaagacgc

SEQ ID NO: 95 - DNA, 20 bp, Artificial Sequence
  Abl1 Forward Primer
acccctgcccttttaaagac

SEQ ID NO: 96 - DNA, 20 bp, Artificial Sequence
  Abl1 Forward Primer
aaaccagcatctggtcttgg

SEQ ID NO: 97 - DNA, 20 bp, Artificial Sequence
  Abl1 Forward Primer
ttctgtagccatccgtgttg

SEQ ID NO: 98 - DNA, 20 bp, Artificial Sequence
  Abl1 Forward Primer
tgagtatcagtggactggcg

SEQ ID NO: 99 - DNA, 20 bp, Artificial Sequence
  Abl1 Forward Primer
cttttactcgtagcctgccc

SEQ ID NO: 100 - DNA, 20 bp, Artificial Sequence
  Abl1 Forward Primer
tgtgtgtgtgtggtgtgagc

SEQ ID NO: 101 - DNA, 20 bp, Artificial Sequence
  Abl1 Forward Primer
gctcaggaaggaggcaagat

SEQ ID NO: 102 - DNA, 20 bp, Artificial Sequence
  Abl1 Forward Primer
ccttgtctttctgcctgtcg

SEQ ID NO: 103 - DNA, 22 bp, Artificial Sequence
  Abl1 Forward Primer
ccttgggttctcttagagtgga

SEQ ID NO: 104 - DNA, 20 bp, Artificial Sequence
  Abl1 Forward Primer
catcaaaaacaaccaggcag

SEQ ID NO: 105 - DNA, 20 bp, Artificial Sequence
  Abl1 Forward Primer
gcccataggccatgtctaaa

SEQ ID NO: 106 - DNA, 22 bp, Artificial Sequence
  Abl1 Forward Primer
tcctcaagaagaagggaaatga

SEQ ID NO: 107 - DNA, 20 bp, Artificial Sequence
  Abl1 Forward Primer
gcctacctttttcccaggac

SEQ ID NO: 108 - DNA, 20 bp, Artificial Sequence
  Abl1 Forward Primer
ccttcagttctccccctttc

SEQ ID NO: 109 - DNA, 20 bp, Artificial Sequence
  Abl1 Forward Primer
cctgacttcataaaggccca

SEQ ID NO: 110 - DNA, 20 bp, Artificial Sequence
  Abl1 Forward Primer
gagtcccttcccgtttcttc

SEQ ID NO: 111 - DNA, 20 bp, Artificial Sequence
  Abl1 Forward Primer
atcatatgtgctcgcacgac

SEQ ID NO: 112 - DNA, 21 bp, Artificial Sequence
  Abl1 Forward Primer
aaaaagccagagctggactaa

SEQ ID NO: 113 - DNA, 22 bp, Artificial Sequence
  Abl1 Forward Primer
cctcataactttttctcctggc

SEQ ID NO: 114 - DNA, 20 bp, Artificial Sequence
  Abl1 Forward Primer
cgcttgcagtggagtctgta

SEQ ID NO: 115 - DNA, 20 bp, Artificial Sequence
  Abl1 Forward Primer
ctgtaaagccaggggagtca

SEQ ID NO: 116 - DNA, 20 bp, Artificial Sequence
  Abl1 Forward Primer
catcgtttcaggcagattga

SEQ ID NO: 117 - DNA, 21 bp, Artificial Sequence
  Abl1 Forward Primer
tgcatagaaagtgcttgaggc

SEQ ID NO: 118 - DNA, 20 bp, Artificial Sequence
  Abl1 Forward Primer
ctcttttctgagccacccag

SEQ ID NO: 119 - DNA, 21 bp, Artificial Sequence
  Abl1 Forward Primer
tggccattttacagaaaggaa

SEQ ID NO: 120 - DNA, 20 bp, Artificial Sequence
  Abl1 Forward Primer
tgcagggaaactcattttga

SEQ ID NO: 121 - DNA, 20 bp, Artificial Sequence
  Abl1 Forward Primer
tgcagtttcagaatggtgga

SEQ ID NO: 122 - DNA, 20 bp, Artificial Sequence
  Abl1 Forward Primer
aacccacaaggagctcacag

SEQ ID NO: 123 - DNA, 19 bp, Artificial Sequence
  Abl1 Forward Primer
gcgcccagctgaaaaatac

SEQ ID NO: 124 - DNA, 22 bp, Artificial Sequence
  Abl1 Forward Primer
tgattgcttctctttctcagca

SEQ ID NO: 125 - DNA, 20 bp, Artificial Sequence
  Abl1 Forward Primer
aggttggaaagctgccatta

SEQ ID NO: 126 - DNA, 20 bp, Artificial Sequence
  Abl1 Forward Primer
catttcaggctgactgtcca

SEQ ID NO: 127 - DNA, 20 bp, Artificial Sequence
  Abl1 Forward Primer
tttaggagctggacactggg

SEQ ID NO: 128 - DNA, 20 bp, Artificial Sequence
  Abl1 Forward Primer
aggagcaattcaaacaagcg

SEQ ID NO: 129 - DNA, 20 bp, Artificial Sequence
  Abl1 Forward Primer
agcacttttgcccacatacc

SEQ ID NO: 130 - DNA, 20 bp, Artificial Sequence
  Abl1 Forward Primer
tgctgttttgttttcaagcg

SEQ ID NO: 131 - DNA, 20 bp, Artificial Sequence
  Abl1 Forward Primer
agctctaggctgctgacagg

SEQ ID NO: 132 - DNA, 20 bp, Artificial Sequence
  Abl1 Forward Primer
tctgctgcttttgcagattc

SEQ ID NO: 133 - DNA, 21 bp, Artificial Sequence
  Abl1 Forward Primer
gcaacaaagctgtaacattgc

SEQ ID NO: 134 - DNA, 20 bp, Artificial Sequence
  Abl1 Forward Primer
tgttgtttcttcgccatcag

SEQ ID NO: 135 - DNA, 20 bp, Artificial Sequence
  Abl1 Forward Primer
aagattcccagccctcttct

SEQ ID NO: 136 - DNA, 23 bp, Artificial Sequence
  Abl1 Forward Primer
aagtatttgagggaaaatggtga

SEQ ID NO: 137 - DNA, 24 bp, Artificial Sequence
  Abl1 Forward Primer
tgcttgagttttaaccatgttatg

SEQ ID NO: 138 - DNA, 20 bp, Artificial Sequence
  Abl1 Forward Primer
attaggcccccattcaagat

SEQ ID NO: 139 - DNA, 19 bp, Artificial Sequence
  Abl1 Forward Primer
aggtgaagtcgttgcccat

SEQ ID NO: 140 - DNA, 20 bp, Artificial Sequence
  Abl1 Forward Primer
gctggacaatgtttgctgaa

SEQ ID NO: 141 - DNA, 20 bp, Artificial Sequence
  Abl1 Forward Primer
acttctatggtgggtgcctg

SEQ ID NO: 142 - DNA, 20 bp, Artificial Sequence
  Abl1 Forward Primer
ggggtttcaccatctcaaaa

SEQ ID NO: 143 - DNA, 22 bp, Artificial Sequence
  Abl1 Forward Primer
ttcttcccaaactaatgcaaca

SEQ ID NO: 144 - DNA, 20 bp, Artificial Sequence
  Abl1 Forward Primer
cagcacaaggcaagcaaata

SEQ ID NO: 145 - DNA, 20 bp, Artificial Sequence
  Abl1 Forward Primer
gtggcacccttttgagtgtt

SEQ ID NO: 146 - DNA, 20 bp, Artificial Sequence
  Abl1 Forward Primer
tcatgaggcctgatctggta

SEQ ID NO: 147 - DNA, 20 bp, Artificial Sequence
  Abl1 Forward Primer
cagggtctcataaccaaggc

SEQ ID NO: 148 - DNA, 22 bp, Artificial Sequence
  Abl1 Forward Primer
tgaaggtaacatggcacatagg

SEQ ID NO: 149 - DNA, 20 bp, Artificial Sequence
  Abl1 Forward Primer
cgactgtgattgttgctgct

SEQ ID NO: 150 - DNA, 20 bp, Artificial Sequence
  Abl1 Forward Primer
ccactgcctcagccttaatc

SEQ ID NO: 151 - DNA, 19 bp, Artificial Sequence
  Abl1 Forward Primer
gcgggaaaatgttggagat

SEQ ID NO: 152 - DNA, 22 bp, Artificial Sequence
  Abl1 Forward Primer
tctgtctctttctctttctcgc

SEQ ID NO: 153 - DNA, 20 bp, Artificial Sequence
  Abl1 Forward Primer
aaaagatcgacccgtgtttg

SEQ ID NO: 154 - DNA, 20 bp, Artificial Sequence
  Abl1 Forward Primer
taagtgaagctcagggccag

SEQ ID NO: 155 - DNA, 22 bp, Artificial Sequence
  Abl1 Forward Primer
tctgctagaatgccatgttttt

SEQ ID NO: 156 - DNA, 20 bp, Artificial Sequence
  Abl1 Forward Primer
catctaggtggagtgggctc

SEQ ID NO: 157 - DNA, 20 bp, Artificial Sequence
  Abl1 Forward Primer
gtcacagctttgccaagtca

SEQ ID NO: 158 - DNA, 20 bp, Artificial Sequence
  Abl1 Forward Primer
tccaggctttccactttcac

SEQ ID NO: 159 - DNA, 20 bp, Artificial Sequence
  Abl1 Forward Primer
gccactggatgctctactga

SEQ ID NO: 160 - DNA, 20 bp, Artificial Sequence
  Abl1 Forward Primer
ctagaggcaatcaccctgga

SEQ ID NO: 161 - DNA, 20 bp, Artificial Sequence
  Abl1 Forward Primer
gcactcagcctgaactttcg

SEQ ID NO: 162 - DNA, 20 bp, Artificial Sequence
  Abl1 Forward Primer
ggccagtctgtccatttcat

SEQ ID NO: 163 - DNA, 21 bp, Artificial Sequence
  Abl1 Forward Primer
tgattgagggaaagctctgaa

SEQ ID NO: 164 - DNA, 20 bp, Artificial Sequence
  Abl1 Forward Primer
tggcacagaacaagagccta

SEQ ID NO: 165 - DNA, 20 bp, Artificial Sequence
  Abl1 Forward Primer
ggctcatggttggcatttta

SEQ ID NO: 166 - DNA, 20 bp, Artificial Sequence
  Abl1 Forward Primer
agggaggaaggggagacata

SEQ ID NO: 167 - DNA, 20 bp, Artificial Sequence
  Abl1 Forward Primer
cagtgcagatgaagtgctgg

SEQ ID NO: 168 - DNA, 20 bp, Artificial Sequence
  Abl1 Forward Primer
acaaggctttctggggaaat

SEQ ID NO: 169 - DNA, 20 bp, Artificial Sequence
  Abl1 Forward Primer
aggattttggccatggttta

SEQ ID NO: 170 - DNA, 20 bp, Artificial Sequence
  Abl1 Forward Primer
ttggtctctaccccagagga

SEQ ID NO: 171 - DNA, 20 bp, Artificial Sequence
  Abl1 Forward Primer
tcttcaagacatgctggtgc

SEQ ID NO: 172 - DNA, 20 bp, Artificial Sequence
  Abl1 Forward Primer
ggggaacgaactctagggag

SEQ ID NO: 173 - DNA, 20 bp, Artificial Sequence
  Abl1 Forward Primer
agctaccctgcaaagcacat

SEQ ID NO: 174 - DNA, 21 bp, Artificial Sequence
  Abl1 Forward Primer
gcatggaaaggacagaagtga

SEQ ID NO: 175 - DNA, 20 bp, Artificial Sequence
  Abl1 Forward Primer
accagagacagtcacaggca

SEQ ID NO: 176 - DNA, 20 bp, Artificial Sequence
  Abl1 Forward Primer
gcctaaaaaggagactggga

SEQ ID NO: 177 - DNA, 20 bp, Artificial Sequence
  Abl1 Forward Primer
atgatctcatccgctggaac

SEQ ID NO: 178 - DNA, 20 bp, Artificial Sequence
  Abl1 Forward Primer
tgaaccgtctccaagaacct

SEQ ID NO: 179 - DNA, 19 bp, Artificial Sequence
  Abl1 Forward Primer
agcagcccctggaagtcta

SEQ ID NO: 180 - DNA, 20 bp, Artificial Sequence
  Abl1 Forward Primer
tggagtgagaggcacttttg

SEQ ID NO: 181 - DNA, 20 bp, Artificial Sequence
  Abl1 Forward Primer
ccggtggaaagtttgtgtct

SEQ ID NO: 182 - DNA, 20 bp, Artificial Sequence
  Abl1 Forward Primer
gaccatcccactttaaccca

SEQ ID NO: 183 - DNA, 20 bp, Artificial Sequence
  Abl1 Forward Primer
gcccttttctgtgctgttgt

SEQ ID NO: 184 - DNA, 20 bp, Artificial Sequence
  Abl1 Forward Primer
caagaatgctctgcctcaca

SEQ ID NO: 185 - DNA, 21 bp, Artificial Sequence
  Abl1 Forward Primer
ccaatgaaatgcaagtgtgaa

SEQ ID NO: 186 - DNA, 20 bp, Artificial Sequence
  Abl1 Forward Primer
cccgccattcagaaaaatta

SEQ ID NO: 187 - DNA, 26 bp, Artificial Sequence
  Abl1 Forward Primer
tccttaaatgagtattttggatttca

SEQ ID NO: 188 - DNA, 23 bp, Artificial Sequence
  Abl1 Forward Primer
gctgttgattgatttccaacttt

SEQ ID NO: 189 - DNA, 21 bp, Artificial Sequence
  Abl1 Forward Primer
gctcaaactattggggaacaa

SEQ ID NO: 190 - DNA, 20 bp, Artificial Sequence
  Abl1 Forward Primer
ctcagggtctgagtgaagcc

SEQ ID NO: 191 - DNA, 20 bp, Artificial Sequence
  Abl1 Forward Primer
gcaaaaacagaacttgccct

SEQ ID NO: 192 - DNA, 20 bp, Artificial Sequence
  Abl1 Forward Primer
aagctggtttccaaagctga

SEQ ID NO: 193 - DNA, 20 bp, Artificial Sequence
  Abl1 Forward Primer
ttgcaagaaagctcaaccaa

SEQ ID NO: 194 - DNA, 20 bp, Artificial Sequence
  Abl1 Forward Primer
gggatcaaacccacagctta

SEQ ID NO: 195 - DNA, 20 bp, Artificial Sequence
  Abl1 Forward Primer
attttacaccaccacccagc

SEQ ID NO: 196 - DNA, 21 bp, Artificial Sequence
  Abl1 Forward Primer
aaggttatgtgcatcaccagg

SEQ ID NO: 197 - DNA, 20 bp, Artificial Sequence
  Abl1 Forward Primer
ctggctgaaatcctattgcc

SEQ ID NO: 198 - DNA, 20 bp, Artificial Sequence
  Abl1 Forward Primer
gccttcagaccacaagggta

SEQ ID NO: 199 - DNA, 20 bp, Artificial Sequence
  Abl1 Forward Primer
tatgtgaccaggcagtgtcc

SEQ ID NO: 200 - DNA, 20 bp, Artificial Sequence
  Abl1 Forward Primer
gctgaaaaatgctgctcaca

SEQ ID NO: 201 - DNA, 20 bp, Artificial Sequence
  Abl1 Forward Primer
agctggggactgggagttat

SEQ ID NO: 202 - DNA, 21 bp, Artificial Sequence
  Abl1 Forward Primer
tctatgagatgcccctgtcac

SEQ ID NO: 203 - DNA, 20 bp, Artificial Sequence
  Abl1 Forward Primer
gctaacctgctctggtggag

SEQ ID NO: 204 - DNA, 20 bp, Artificial Sequence
  Abl1 Forward Primer
ttcatggaaccaggtgcata

SEQ ID NO: 205 - DNA, 20 bp, Artificial Sequence
  Abl1 Forward Primer
ttaggggagcccttagcatt

SEQ ID NO: 206 - DNA, 20 bp, Artificial Sequence
  Abl1 Forward Primer
cagtcttttccagagggtcg

SEQ ID NO: 207 - DNA, 20 bp, Artificial Sequence
  Abl1 Forward Primer
cttgcagagggataagccag

SEQ ID NO: 208 - DNA, 20 bp, Artificial Sequence
  Abl1 Forward Primer
tgacataacccacagccaaa

SEQ ID NO: 209 - DNA, 20 bp, Artificial Sequence
  Abl1 Forward Primer
agtgatggttggctaccctg

SEQ ID NO: 210 - DNA, 20 bp, Artificial Sequence
  Abl1 Forward Primer
tgaccctaggtcctcacctg

SEQ ID NO: 211 - DNA, 20 bp, Artificial Sequence
  Abl1 Forward Primer
acggaccttaaaactggcct

SEQ ID NO: 212 - DNA, 20 bp, Artificial Sequence
  Abl1 Forward Primer
ttgaaggtaggctgggactg

SEQ ID NO: 213 - DNA, 20 bp, Artificial Sequence
  Abl1 Forward Primer
tggaggggttttggtgtaaa

SEQ ID NO: 214 - DNA, 19 bp, Artificial Sequence
  Abl1 Forward Primer
atccccagtgggttccaat

SEQ ID NO: 215 - DNA, 20 bp, Artificial Sequence
  Abl1 Forward Primer
gccaagggaaggaagttttc

SEQ ID NO: 216 - DNA, 20 bp, Artificial Sequence
  Abl1 Forward Primer
ggtgcacacattgagactgg

SEQ ID NO: 217 - DNA, 20 bp, Artificial Sequence
  Abl1 Forward Primer
tctatttgacggttcctggg

SEQ ID NO: 218 - DNA, 20 bp, Artificial Sequence
  Abl1 Forward Primer
ttcagcacactttcaccagg

SEQ ID NO: 219 - DNA, 21 bp, Artificial Sequence
  Abl1 Forward Primer
aaagtgggtgcctttcagaat

SEQ ID NO: 220 - DNA, 20 bp, Artificial Sequence
  Abl1 Forward Primer
ggatattccccaatctgcaa

SEQ ID NO: 221 - DNA, 20 bp, Artificial Sequence
  Abl1 Forward Primer
tcctttgcagtttgtggcta

SEQ ID NO: 222 - DNA, 20 bp, Artificial Sequence
  Abl1 Forward Primer
gtcaagcaaccttgggtcat

SEQ ID NO: 223 - DNA, 20 bp, Artificial Sequence
  Abl1 Forward Primer
gaatttggaaaagaccgctg

SEQ ID NO: 224 - DNA, 20 bp, Artificial Sequence
  Abl1 Forward Primer
tcagggaccatgtgcattta

SEQ ID NO: 225 - DNA, 20 bp, Artificial Sequence
  Abl1 Forward Primer
tcctcccttgtgtgtttgtg

SEQ ID NO: 226 - DNA, 20 bp, Artificial Sequence
  Abl1 Forward Primer
gcagagagggctcagaagaa

SEQ ID NO: 227 - DNA, 20 bp, Artificial Sequence
  Abl1 Forward Primer
tgtaagtaaaggttggcccg

SEQ ID NO: 228 - DNA, 20 bp, Artificial Sequence
  Abl1 Forward Primer
ttcctcctttggcctttgta

SEQ ID NO: 229 - DNA, 20 bp, Artificial Sequence
  Abl1 Forward Primer
ccacgtgccagaatagttca

SEQ ID NO: 230 - DNA, 19 bp, Artificial Sequence
  Abl1 Forward Primer
aagaggtggggaagcacat

SEQ ID NO: 231 - DNA, 20 bp, Artificial Sequence
  Abl1 Forward Primer
cttctgcaggaggacaccat

SEQ ID NO: 232 - DNA, 20 bp, Artificial Sequence
  Abl1 Forward Primer
aaacttgggcattttccaga

SEQ ID NO: 233 - DNA, 20 bp, Artificial Sequence
  Abl1 Forward Primer
agtctcaggatgcaggtgct

SEQ ID NO: 234 - DNA, 20 bp, Artificial Sequence
  Abl1 Forward Primer
gccatggagtacctggagaa

SEQ ID NO: 235 - DNA, 20 bp, Artificial Sequence
  Abl1 Forward Primer
gctaatccccggagtaagga

SEQ ID NO: 236 - DNA, 22 bp, Artificial Sequence
  Abl1 Forward Primer
ccacttaacttgctgtcctctg

SEQ ID NO: 237 - DNA, 20 bp, Artificial Sequence
  Abl1 Forward Primer
ctccacaccaccactgtgac

SEQ ID NO: 238 - DNA, 21 bp, Artificial Sequence
  Abl1 Forward Primer
ttccttcttcattcaagcgaa

SEQ ID NO: 239 - DNA, 20 bp, Artificial Sequence
  Abl1 Forward Primer
ggactgggctcagtgtttgt

SEQ ID NO: 240 - DNA, 20 bp, Artificial Sequence
  Abl1 Forward Primer
cactgtgttaattgccgtgg

SEQ ID NO: 241 - DNA, 24 bp, Artificial Sequence
  Abl1 Forward Primer
cctgttgatattcagattgtctcg

SEQ ID NO: 242 - DNA, 21 bp, Artificial Sequence
  Abl1 Forward Primer
ggggctttggagatagtcttg

SEQ ID NO: 243 - DNA, 20 bp, Artificial Sequence
  Abl1 Forward Primer
tgctttgggaaattgctacc

SEQ ID NO: 244 - DNA, 20 bp, Artificial Sequence
  Abl1 Forward Primer
ttcccacacatgtctttcca

SEQ ID NO: 245 - DNA, 20 bp, Artificial Sequence
  Abl1 Forward Primer
gtatgctccagtcagacgca

SEQ ID NO: 246 - DNA, 20 bp, Artificial Sequence
  Abl1 Forward Primer
ccatattcctgccagcatct

SEQ ID NO: 247 - DNA, 20 bp, Artificial Sequence
  Abl1 Forward Primer
gaaatccaccaagcctttga

SEQ ID NO: 248 - DNA, 20 bp, Artificial Sequence
  Abl1 Forward Primer
aagggctgtttctccggtat

SEQ ID NO: 249 - DNA, 20 bp, Artificial Sequence
  Abl1 Forward Primer
ggctacattcaggccatcat

SEQ ID NO: 250 - DNA, 20 bp, Artificial Sequence
  Abl1 Forward Primer
atctcccacctattacccgc

SEQ ID NO: 251 - DNA, 20 bp, Artificial Sequence
  Abl1 Forward Primer
aaaaacagaacatgcagccc

SEQ ID NO: 252 - DNA, 20 bp, Artificial Sequence
  Abl1 Forward Primer
agtgatctcttggtgagccg

SEQ ID NO: 253 - DNA, 20 bp, Artificial Sequence
  Abl1 Forward Primer
ctgaatgaagatgagcgcct

SEQ ID NO: 254 - DNA, 20 bp, Artificial Sequence
  Abl1 Forward Primer
atttggagggcacaaaagtg

SEQ ID NO: 255 - DNA, 20 bp, Artificial Sequence
  Abl1 Forward Primer
ccacaaggaagaagctggaa

SEQ ID NO: 256 - DNA, 20 bp, Artificial Sequence
  Abl1 Forward Primer
gatgctgtgaacagtgacgc

SEQ ID NO: 257 - DNA, 20 bp, Artificial Sequence
  Abl1 Forward Primer
attccatccagcaaatgagg

SEQ ID NO: 258 - DNA, 20 bp, Artificial Sequence
  Abl1 Forward Primer
ccctgtggagtccagctcta

SEQ ID NO: 259 - DNA, 20 bp, Artificial Sequence
  Abl1 Forward Primer
cctgaactgaggccttgtgt

SEQ ID NO: 260 - DNA, 20 bp, Artificial Sequence
  Abl1 Forward Primer
cttgctctcttgtgacgtgc

SEQ ID NO: 261 - DNA, 20 bp, Artificial Sequence
  Abl1 Forward Primer
tcctttggaacaagacagcc

SEQ ID NO: 262 - DNA, 20 bp, Artificial Sequence
  Abl1 Forward Primer
ctcctggaccttgacagagc

SEQ ID NO: 263 - DNA, 20 bp, Artificial Sequence
  Abl1 Forward Primer
ggccttgaagacagagcaaa

SEQ ID NO: 264 - DNA, 20 bp, Artificial Sequence
  Abl1 Forward Primer
attcttggcagattgcttcg

SEQ ID NO: 265 - DNA, 20 bp, Artificial Sequence
  Abl1 Reverse Primer
gttgacacttgcaagcagga

SEQ ID NO: 266 - DNA, 20 bp, Artificial Sequence
  Abl1 Reverse Primer
gattccttcttccctgctcc

SEQ ID NO: 267 - DNA, 20 bp, Artificial Sequence
  Abl1 Reverse Primer
ccctcaggaaactaaagccc

SEQ ID NO: 268 - DNA, 20 bp, Artificial Sequence
  Abl1 Reverse Primer
tgcttccccacttgattttt

SEQ ID NO: 269 - DNA, 20 bp, Artificial Sequence
  Abl1 Reverse Primer
ccactggcacacttcatacg

SEQ ID NO: 270 - DNA, 20 bp, Artificial Sequence
  Abl1 Reverse Primer
tcctgaatttgggaaccatc

SEQ ID NO: 271 - DNA, 20 bp, Artificial Sequence
  Abl1 Reverse Primer
gtgcacgtcatgaagaatgc

SEQ ID NO: 272 - DNA, 20 bp, Artificial Sequence
  Abl1 Reverse Primer
tagccctttgaccctgaatg

SEQ ID NO: 273 - DNA, 20 bp, Artificial Sequence
  Abl1 Reverse Primer
cctctaggctgctccttgaa

SEQ ID NO: 274 - DNA, 20 bp, Artificial Sequence
  Abl1 Reverse Primer
accactttggtccaagcatc

SEQ ID NO: 275 - DNA, 21 bp, Artificial Sequence
  Abl1 Reverse Primer
tgcaacacacttcacaacaca

SEQ ID NO: 276 - DNA, 20 bp, Artificial Sequence
  Abl1 Reverse Primer
aggatctgaacacacagggg

SEQ ID NO: 277 - DNA, 20 bp, Artificial Sequence
  Abl1 Reverse Primer
gggtgtctggaccaaggata

SEQ ID NO: 278 - DNA, 20 bp, Artificial Sequence
  Abl1 Reverse Primer
gagagaagatgagggcatgg

SEQ ID NO: 279 - DNA, 20 bp, Artificial Sequence
  Abl1 Reverse Primer
caggcattagatgacaggca

SEQ ID NO: 280 - DNA, 20 bp, Artificial Sequence
  Abl1 Reverse Primer
aggccttattctaccaggca

SEQ ID NO: 281 - DNA, 22 bp, Artificial Sequence
  Abl1 Reverse Primer
gcagcaggtattttgaaagttg

SEQ ID NO: 282 - DNA, 20 bp, Artificial Sequence
  Abl1 Reverse Primer
ggacccattccacactgttt

SEQ ID NO: 283 - DNA, 20 bp, Artificial Sequence
  Abl1 Reverse Primer
aagctggggaaaaggtttgt

SEQ ID NO: 284 - DNA, 20 bp, Artificial Sequence
  Abl1 Reverse Primer
caatttcatccctccttgct

SEQ ID NO: 285 - DNA, 20 bp, Artificial Sequence
  Abl1 Reverse Primer
taccaaggcaaatctgggag

SEQ ID NO: 286 - DNA, 20 bp, Artificial Sequence
  Abl1 Reverse Primer
ccaatatggggagatcctga

SEQ ID NO: 287 - DNA, 22 bp, Artificial Sequence
  Abl1 Reverse Primer
cagacatacgcaaaatggtagc

SEQ ID NO: 288 - DNA, 20 bp, Artificial Sequence
  Abl1 Reverse Primer
gcaccctgaaaaatggtctt

SEQ ID NO: 289 - DNA, 23 bp, Artificial Sequence
  Abl1 Reverse Primer
ttgattgattgtgtgtgtgtgaa

SEQ ID NO: 290 - DNA, 20 bp, Artificial Sequence
  Abl1 Reverse Primer
cgcaccacaacaaaggacta

SEQ ID NO: 291 - DNA, 20 bp, Artificial Sequence
  Abl1 Reverse Primer
tcaggagaggtggaagtgct

SEQ ID NO: 292 - DNA, 20 bp, Artificial Sequence
  Abl1 Reverse Primer
tgggaaccaccagagagttt

SEQ ID NO: 293 - DNA, 21 bp, Artificial Sequence
  Abl1 Reverse Primer
gagcgaaactctgtctccaaa

SEQ ID NO: 294 - DNA, 20 bp, Artificial Sequence
  Abl1 Reverse Primer
aatgtggccactccagacat

SEQ ID NO: 295 - DNA, 24 bp, Artificial Sequence
  Abl1 Reverse Primer
tgagaaacctaaatgtgaaggtca

SEQ ID NO: 296 - DNA, 20 bp, Artificial Sequence
  Abl1 Reverse Primer
ctggtttgacacacaatggc

SEQ ID NO: 297 - DNA, 20 bp, Artificial Sequence
  Abl1 Reverse Primer
aatctgccctgaccagaaga

SEQ ID NO: 298 - DNA, 23 bp, Artificial Sequence
  Abl1 Reverse Primer
tgttgaacttgacaaagaaccaa

SEQ ID NO: 299 - DNA, 20 bp, Artificial Sequence
  Abl1 Reverse Primer
ctttggaggggataggctct

SEQ ID NO: 300 - DNA, 20 bp, Artificial Sequence
  Abl1 Reverse Primer
cctgggagagagcaaagaaa

SEQ ID NO: 301 - DNA, 20 bp, Artificial Sequence
  Abl1 Reverse Primer
gatttggaaagcagatggga

SEQ ID NO: 302 - DNA, 20 bp, Artificial Sequence
  Abl1 Reverse Primer
gtcatcgtcccctttgagaa

SEQ ID NO: 303 - DNA, 20 bp, Artificial Sequence
  Abl1 Reverse Primer
cctgcagtagggcaagaaag

SEQ ID NO: 304 - DNA, 20 bp, Artificial Sequence
  Abl1 Reverse Primer
cacggtattcaaaccccatc

SEQ ID NO: 305 - DNA, 20 bp, Artificial Sequence
  Abl1 Reverse Primer
taggcgctcaggacactttt

SEQ ID NO: 306 - DNA, 20 bp, Artificial Sequence
  Abl1 Reverse Primer
cccatttctagtcgccagac

SEQ ID NO: 307 - DNA, 20 bp, Artificial Sequence
  Abl1 Reverse Primer
gcacgtcttgctgaactcaa

SEQ ID NO: 308 - DNA, 20 bp, Artificial Sequence
  Abl1 Reverse Primer
ccaacctcgcagctagaact

SEQ ID NO: 309 - DNA, 20 bp, Artificial Sequence
  Abl1 Reverse Primer
ccaggaaaaccgaatgagaa

SEQ ID NO: 310 - DNA, 20 bp, Artificial Sequence
  Abl1 Reverse Primer
cacagtgagcagaatcccaa

SEQ ID NO: 311 - DNA, 20 bp, Artificial Sequence
  Abl1 Reverse Primer
caaggcaaaaaggagctttg

SEQ ID NO: 312 - DNA, 19 bp, Artificial Sequence
  Abl1 Reverse Primer
cggcctcaggttcttcact

SEQ ID NO: 313 - DNA, 20 bp, Artificial Sequence
  Abl1 Reverse Primer
caaacccaaaaggaacagga

SEQ ID NO: 314 - DNA, 25 bp, Artificial Sequence
  Abl1 Reverse Primer
agtttcctaacatttaagcagaaaa

SEQ ID NO: 315 - DNA, 21 bp, Artificial Sequence
  Abl1 Reverse Primer
tgatcacaccatagcactgga

SEQ ID NO: 316 - DNA, 20 bp, Artificial Sequence
  Abl1 Reverse Primer
ccagaaagaagtgcaaaggc

SEQ ID NO: 317 - DNA, 20 bp, Artificial Sequence
  Abl1 Reverse Primer
tagcccaacctaacaccaat

SEQ ID NO: 318 - DNA, 20 bp, Artificial Sequence
  Abl1 Reverse Primer
gtctcctctgggaagcctct

SEQ ID NO: 319 - DNA, 20 bp, Artificial Sequence
  Abl1 Reverse Primer
cacagaagaaacgcactcca

SEQ ID NO: 320 - DNA, 20 bp, Artificial Sequence
  Abl1 Reverse Primer
gccaccacgaaaaagaaatc

SEQ ID NO: 321 - DNA, 20 bp, Artificial Sequence
  Abl1 Reverse Primer
atcatggcctatccaacacc

SEQ ID NO: 322 - DNA, 21 bp, Artificial Sequence
  Abl1 Reverse Primer
agaaacacaaaggctgtcagg

SEQ ID NO: 323 - DNA, 20 bp, Artificial Sequence
  Abl1 Reverse Primer
agaccaacaccctgtccttg

SEQ ID NO: 324 - DNA, 20 bp, Artificial Sequence
  Abl1 Reverse Primer
gtctgcggtcatggatctct

SEQ ID NO: 325 - DNA, 20 bp, Artificial Sequence
  Abl1 Reverse Primer
cccaagtcctaaggcatcaa

SEQ ID NO: 326 - DNA, 20 bp, Artificial Sequence
  Abl1 Reverse Primer
gctagcaggaggaggacaga

SEQ ID NO: 327 - DNA, 20 bp, Artificial Sequence
  Abl1 Reverse Primer
aggggaagaggacaaagagc

SEQ ID NO: 328 - DNA, 20 bp, Artificial Sequence
  Abl1 Reverse Primer
ttttctcaaatgcaggtggc

SEQ ID NO: 329 - DNA, 20 bp, Artificial Sequence
  Abl1 Reverse Primer
ctgggtgatgctgttcaaga

SEQ ID NO: 330 - DNA, 20 bp, Artificial Sequence
  Abl1 Reverse Primer
catacgctctgagttgctgc

SEQ ID NO: 331 - DNA, 20 bp, Artificial Sequence
  Abl1 Reverse Primer
tctaacaagcaacatccccc

SEQ ID NO: 332 - DNA, 20 bp, Artificial Sequence
  Abl1 Reverse Primer
agctgttcccaatgaacaaa

SEQ ID NO: 333 - DNA, 22 bp, Artificial Sequence
  Abl1 Reverse Primer
tgcttaattttctgtgccaatg

SEQ ID NO: 334 - DNA, 20 bp, Artificial Sequence
  Abl1 Reverse Primer
ccaattatccaggcccaata

SEQ ID NO: 335 - DNA, 24 bp, Artificial Sequence
  Abl1 Reverse Primer
ttctgagtgaagatatttggaaca

SEQ ID NO: 336 - DNA, 20 bp, Artificial Sequence
  Abl1 Reverse Primer
tctctttcctctcaaccgct

SEQ ID NO: 337 - DNA, 20 bp, Artificial Sequence
  Abl1 Reverse Primer
tcctcacctaatccctgtgc

SEQ ID NO: 338 - DNA, 23 bp, Artificial Sequence
  Abl1 Reverse Primer
tttcttgcaagttcagctattca

SEQ ID NO: 339 - DNA, 20 bp, Artificial Sequence
  Abl1 Reverse Primer
gcattgacttctgccagcta

SEQ ID NO: 340 - DNA, 25 bp, Artificial Sequence
  Abl1 Reverse Primer
tttcactgatcgtagttttcatttc

SEQ ID NO: 341 - DNA, 20 bp, Artificial Sequence
  Abl1 Reverse Primer
tgggatttgctctgattcct

SEQ ID NO: 342 - DNA, 20 bp, Artificial Sequence
  Abl1 Reverse Primer
accgtgctggagacatcagt

SEQ ID NO: 343 - DNA, 26 bp, Artificial Sequence
  Abl1 Reverse Primer
aagctcacttaattgaatttcacaga

SEQ ID NO: 344 - DNA, 20 bp, Artificial Sequence
  Abl1 Reverse Primer
cttggcaaaggagagcagag

SEQ ID NO: 345 - DNA, 22 bp, Artificial Sequence
  Abl1 Reverse Primer
ccctatttgccacaaatgtttt

SEQ ID NO: 346 - DNA, 20 bp, Artificial Sequence
  Abl1 Reverse Primer
acagaggcaagaaggatgga

SEQ ID NO: 347 - DNA, 21 bp, Artificial Sequence
  Abl1 Reverse Primer
aaacataccattgccaatcca

SEQ ID NO: 348 - DNA, 20 bp, Artificial Sequence
  Abl1 Reverse Primer
agctagctgtcaggtttgcc

SEQ ID NO: 349 - DNA, 20 bp, Artificial Sequence
  Abl1 Reverse Primer
acatttccaccttcactgcc

SEQ ID NO: 350 - DNA, 20 bp, Artificial Sequence
  Abl1 Reverse Primer
tcttgggactgcgttgactc

SEQ ID NO: 351 - DNA, 20 bp, Artificial Sequence
  Abl1 Reverse Primer
ctcccaaaccaatcacccta

SEQ ID NO: 352 - DNA, 21 bp, Artificial Sequence
  Abl1 Reverse Primer
tccccttggtgtttgttacag

SEQ ID NO: 353 - DNA, 20 bp, Artificial Sequence
  Abl1 Reverse Primer
atgcttgaaagccactgcat

SEQ ID NO: 354 - DNA, 20 bp, Artificial Sequence
  Abl1 Reverse Primer
agcagctaacagatgctggg

SEQ ID NO: 355 - DNA, 20 bp, Artificial Sequence
  Abl1 Reverse Primer
gccaatttccaagtggactg

SEQ ID NO: 356 - DNA, 20 bp, Artificial Sequence
  Abl1 Reverse Primer
gccaagctaagtgtccaagc

SEQ ID NO: 357 - DNA, 20 bp, Artificial Sequence
  Abl1 Reverse Primer
cacatgcacaaacttccaca

SEQ ID NO: 358 - DNA, 20 bp, Artificial Sequence
  Abl1 Reverse Primer
cactgcaagaggtgccttta

SEQ ID NO: 359 - DNA, 23 bp, Artificial Sequence
  Abl1 Reverse Primer
cccaaaagatactgtttaagcca

SEQ ID NO: 360 - DNA, 20 bp, Artificial Sequence
  Abl1 Reverse Primer
tgcagggtgaatgtaccaaa

SEQ ID NO: 361 - DNA, 20 bp, Artificial Sequence
  Abl1 Reverse Primer
atgtcacgaaacatggcaaa

SEQ ID NO: 362 - DNA, 20 bp, Artificial Sequence
  Abl1 Reverse Primer
tccacaggaacacacagcat

SEQ ID NO: 363 - DNA, 20 bp, Artificial Sequence
  Abl1 Reverse Primer
cacacagaaggcagagtcca

SEQ ID NO: 364 - DNA, 20 bp, Artificial Sequence
  Abl1 Reverse Primer
atgcaaaagccgtaatccac

SEQ ID NO: 365 - DNA, 20 bp, Artificial Sequence
  Abl1 Reverse Primer
acaggtgacgggaaaacatc

SEQ ID NO: 366 - DNA, 20 bp, Artificial Sequence
  Abl1 Reverse Primer
tcacaaaatgtctccccaca

SEQ ID NO: 367 - DNA, 20 bp, Artificial Sequence
  Abl1 Reverse Primer
ggtcagcagccacaagttct

SEQ ID NO: 368 - DNA, 20 bp, Artificial Sequence
  Abl1 Reverse Primer
gcctctcgtggtttacatcc

SEQ ID NO: 369 - DNA, 20 bp, Artificial Sequence
  Abl1 Reverse Primer
agaaagacaaaagggtgggg

SEQ ID NO: 370 - DNA, 21 bp, Artificial Sequence
  Abl1 Reverse Primer
ccctgtgtctacttcctgggt

SEQ ID NO: 371 - DNA, 20 bp, Artificial Sequence
  Abl1 Reverse Primer
gcaacactgccaagactcac

SEQ ID NO: 372 - DNA, 20 bp, Artificial Sequence
  Abl1 Reverse Primer
caaatttgccaagtgtggtg

SEQ ID NO: 373 - DNA, 20 bp, Artificial Sequence
  Abl1 Reverse Primer
ccattgttcctggggtaaga

SEQ ID NO: 374 - DNA, 20 bp, Artificial Sequence
  Abl1 Reverse Primer
agggcatccttcctgttttt

SEQ ID NO: 375 - DNA, 22 bp, Artificial Sequence
  Abl1 Reverse Primer
tgttttgtccattgagactgct

SEQ ID NO: 376 - DNA, 24 bp, Artificial Sequence
  Abl1 Reverse Primer
ccctatttttaaaaggcactctca

SEQ ID NO: 377 - DNA, 24 bp, Artificial Sequence
  Abl1 Reverse Primer
agcttttctaagtcccacaattag

SEQ ID NO: 378 - DNA, 21 bp, Artificial Sequence
  Abl1 Reverse Primer
gcatggcaggacatactaagg

SEQ ID NO: 379 - DNA, 20 bp, Artificial Sequence
  Abl1 Reverse Primer
ataattctttcccatggccc

SEQ ID NO: 380 - DNA, 20 bp, Artificial Sequence
  Abl1 Reverse Primer
gcaagatgaaattgaggcca

SEQ ID NO: 381 - DNA, 20 bp, Artificial Sequence
  Abl1 Reverse Primer
ctctgtcaaggtagcgtcca

SEQ ID NO: 382 - DNA, 20 bp, Artificial Sequence
  Abl1 Reverse Primer
tccagcatattcaggaatcg

SEQ ID NO: 383 - DNA, 23 bp, Artificial Sequence
  Abl1 Reverse Primer
tttccaggtgtttagtcaacttt

SEQ ID NO: 384 - DNA, 20 bp, Artificial Sequence
  Abl1 Reverse Primer
gagatcctctgtcctgcctg

SEQ ID NO: 385 - DNA, 20 bp, Artificial Sequence
  Abl1 Reverse Primer
tttgctgggattctacctgg

SEQ ID NO: 386 - DNA, 20 bp, Artificial Sequence
  Abl1 Reverse Primer
aggaaatagagctggcctgg

SEQ ID NO: 387 - DNA, 20 bp, Artificial Sequence
  Abl1 Reverse Primer
ccaacaagcagaagtcacca

SEQ ID NO: 388 - DNA, 20 bp, Artificial Sequence
  Abl1 Reverse Primer
gaagggctgccatttgtaga

SEQ ID NO: 389 - DNA, 20 bp, Artificial Sequence
  Abl1 Reverse Primer
aaagaggtgtgtgtgagggg

SEQ ID NO: 390 - DNA, 22 bp, Artificial Sequence
  Abl1 Reverse Primer
aaaaaggggaaaaagcaatatg

SEQ ID NO: 391 - DNA, 23 bp, Artificial Sequence
  Abl1 Reverse Primer
aacagccatttagtccttatggt

SEQ ID NO: 392 - DNA, 20 bp, Artificial Sequence
  Abl1 Reverse Primer
acgcactccctctcctcttt

SEQ ID NO: 393 - DNA, 20 bp, Artificial Sequence
  Abl1 Reverse Primer
acaggaatcccacacaggac

SEQ ID NO: 394 - DNA, 20 bp, Artificial Sequence
  Abl1 Reverse Primer
tccttagaggagcaatggga

SEQ ID NO: 395 - DNA, 20 bp, Artificial Sequence
  Abl1 Reverse Primer
cagctggaggggagtgtaga

SEQ ID NO: 396 - DNA, 20 bp, Artificial Sequence
  Abl1 Reverse Primer
tgctgcaaaaaccctaaagc

SEQ ID NO: 397 - DNA, 21 bp, Artificial Sequence
  Abl1 Reverse Primer
ttaagcaaaaatggtttggga

SEQ ID NO: 398 - DNA, 20 bp, Artificial Sequence
  Abl1 Reverse Primer
tgccctaggtcacatagcaa

SEQ ID NO: 399 - DNA, 20 bp, Artificial Sequence
  Abl1 Reverse Primer
gttttgtatgcgtggaaggg

SEQ ID NO: 400 - DNA, 20 bp, Artificial Sequence
  Abl1 Reverse Primer
tatcaccatccataaccccc

SEQ ID NO: 401 - DNA, 20 bp, Artificial Sequence
  Abl1 Reverse Primer
ggaccaaatctgaactgcct

SEQ ID NO: 402 - DNA, 20 bp, Artificial Sequence
  Abl1 Reverse Primer
agcagtctggaggttttcca

SEQ ID NO: 403 - DNA, 20 bp, Artificial Sequence
  Abl1 Reverse Primer
gtgggtccagtgtatgtcca

SEQ ID NO: 404 - DNA, 20 bp, Artificial Sequence
  Abl1 Reverse Primer
tgcaggtggaacagagacag

SEQ ID NO: 405 - DNA, 20 bp, Artificial Sequence
  Abl1 Reverse Primer
tgggaataggacgaacagga

SEQ ID NO: 406 - DNA, 20 bp, Artificial Sequence
  Abl1 Reverse Primer
cacagccaggaggtaggaag

SEQ ID NO: 407 - DNA, 20 bp, Artificial Sequence
  Abl1 Reverse Primer
ccatatccagcttttgacgc

SEQ ID NO: 408 - DNA, 20 bp, Artificial Sequence
  Abl1 Reverse Primer
tgcccttttggaaagttcag

SEQ ID NO: 409 - DNA, 20 bp, Artificial Sequence
  Abl1 Reverse Primer
accatcagggaagtttgcag

SEQ ID NO: 410 - DNA, 21 bp, Artificial Sequence
  Abl1 Reverse Primer
aagatcttcacttggctctgc

SEQ ID NO: 411 - DNA, 20 bp, Artificial Sequence
  Abl1 Reverse Primer
aagtcagacaccttgcccac

SEQ ID NO: 412 - DNA, 20 bp, Artificial Sequence
  Abl1 Reverse Primer
ggaactcaatggcaccaaat

SEQ ID NO: 413 - DNA, 20 bp, Artificial Sequence
  Abl1 Reverse Primer
aatgagaattttcggaggca

SEQ ID NO: 414 - DNA, 20 bp, Artificial Sequence
  Abl1 Reverse Primer
cactccactttagaagccgc

SEQ ID NO: 415 - DNA, 18 bp, Artificial Sequence
  Abl1 Reverse Primer
aagacaagacccggggag

SEQ ID NO: 416 - DNA, 19 bp, Artificial Sequence
  Abl1 Reverse Primer
ggaaattccacaacgtggg

SEQ ID NO: 417 - DNA, 20 bp, Artificial Sequence
  Abl1 Reverse Primer
aacgccttcttaaatgggct

SEQ ID NO: 418 - DNA, 20 bp, Artificial Sequence
  Abl1 Reverse Primer
gggagcaccagtctcaaatc

SEQ ID NO: 419 - DNA, 20 bp, Artificial Sequence
  Abl1 Reverse Primer
cctggaatcccagagacaga

SEQ ID NO: 420 - DNA, 20 bp, Artificial Sequence
  Abl1 Reverse Primer
taggcacccatctgcaaagt

SEQ ID NO: 421 - DNA, 21 bp, Artificial Sequence
  Abl1 Reverse Primer
aagaaggtttaacccaaggca

SEQ ID NO: 422 - DNA, 20 bp, Artificial Sequence
  Abl1 Reverse Primer
tgttgctttgacagctaggc

SEQ ID NO: 423 - DNA, 25 bp, Artificial Sequence
  Abl1 Reverse Primer
cccttttaggatttcttacatacaa

SEQ ID NO: 424 - DNA, 20 bp, Artificial Sequence
  Abl1 Reverse Primer
cgtctccaggggaaagaaat

SEQ ID NO: 425 - DNA, 24 bp, Artificial Sequence
  Abl1 Reverse Primer
ttctttgttactgaacaagggaag

SEQ ID NO: 426 - DNA, 20 bp, Artificial Sequence
  Abl1 Reverse Primer
acggaagctcagagaggtca

SEQ ID NO: 427 - DNA, 20 bp, Artificial Sequence
  Abl1 Reverse Primer
aagaccagccaagagcacag

SEQ ID NO: 428 - DNA, 20 bp, Artificial Sequence
  Abl1 Reverse Primer
gccaaaaatcaaggacagga

SEQ ID NO: 429 - DNA, 23 bp, Artificial Sequence
  Abl1 Reverse Primer
aagtcttccaatatcccatttga

SEQ ID NO: 430 - DNA, 20 bp, Artificial Sequence
  Abl1 Reverse Primer
gcgcttctcttgctctcact

SEQ ID NO: 431 - DNA, 21 bp, Artificial Sequence
  Abl1 Reverse Primer
gcctaattgtattcacggcct

SEQ ID NO: 432 - DNA, 20 bp, Artificial Sequence
  Abl1 Reverse Primer
tgtccacagtcagcctgcta

SEQ ID NO: 433 - DNA, 20 bp, Artificial Sequence
  Abl1 Reverse Primer
tgggtgaactcagatgtgga

SEQ ID NO: 434 - DNA, 20 bp, Artificial Sequence
  Abl1 Reverse Primer
ttctcaactgcacaacaggg

SEQ ID NO: 435 - DNA, 20 bp, Artificial Sequence
  Abl1 Reverse Primer
ctaaccggtccttcctcctc

SEQ ID NO: 436 - DNA, 20 bp, Artificial Sequence
  Abl1 Reverse Primer
tggggttgttattccttcca

SEQ ID NO: 437 - DNA, 20 bp, Artificial Sequence
  Abl1 Reverse Primer
cattccacctccactcccta

SEQ ID NO: 438 - DNA, 21 bp, Artificial Sequence
  Abl1 Reverse Primer
ccttccaagaatctacggtga

SEQ ID NO: 439 - DNA, 21 bp, Artificial Sequence
  Abl1 Reverse Primer
tgagccaattccttagtgcag

SEQ ID NO: 440 - DNA, 21 bp, Artificial Sequence
  Abl1 Reverse Primer
tcatgtaaaagattccagggg

SEQ ID NO: 441 - DNA, 20 bp, Artificial Sequence
  Abl1 Reverse Primer
gacgtgacaaacgttccctt

SEQ ID NO: 442 - DNA, 19 bp, Artificial Sequence
  Abl1 Reverse Primer
aagggaaatgcccatgaac

SEQ ID NO: 443 - DNA, 20 bp, Artificial Sequence
  Abl1 Reverse Primer
aaccaggccacagaattcac

SEQ ID NO: 444 - DNA, 20 bp, Artificial Sequence
  Abl1 Reverse Primer
agatgccccaactagttccc

SEQ ID NO: 445 - DNA, 20 bp, Artificial Sequence
  Abl1 Reverse Primer
gtagccacagtccaacacca

SEQ ID NO: 446 - DNA, 20 bp, Artificial Sequence
  Abl1 Reverse Primer
ggcccacacaggaaattaaa

SEQ ID NO: 447 - DNA, 20 bp, Artificial Sequence
  Abl1 Reverse Primer
tgacagccagtgtgggtaag

SEQ ID NO: 448 - DNA, 20 bp, Artificial Sequence
  Abl1 Reverse Primer
catgactggctcttgtggac

SEQ ID NO: 449 - DNA, 20 bp, Artificial Sequence
  Abl1 Reverse Primer
ggagggagaacttagagcca

SEQ ID NO: 450 - DNA, 20 bp, Artificial Sequence
  Abl1 Reverse Primer
cggaaacatgaccgagaact

SEQ ID NO: 451 - DNA, 24 bp, Artificial Sequence
  Abl1 Reverse Primer
attcattacagggtcaaataggtt

SEQ ID NO: 452 - DNA, 20 bp, Artificial Sequence
  Abl1 Reverse Primer
ggacagcgtctctgaggact

SEQ ID NO: 453 - DNA, 23 bp, Artificial Sequence
  Abl1 Reverse Primer
ggaagagaaaattgggagaaaaa

SEQ ID NO: 454 - DNA, 20 bp, Artificial Sequence
  Abl1 Reverse Primer
gcaaagggtggtaggtcaaa

SEQ ID NO: 455 - DNA, 22 bp, Artificial Sequence
  Abl1 Reverse Primer
cgtttacatttgaagcttcctg

SEQ ID NO: 456 - DNA, 20 bp, Artificial Sequence
  Abl1 Reverse Primer
agcagatactcagcggcatt

SEQ ID NO: 457 - DNA, 20 bp, Artificial Sequence
  Abl1 Reverse Primer
tgtgtccaaaacccaacaga

SEQ ID NO: 458 - DNA, 20 bp, Artificial Sequence
  Abl1 Reverse Primer
actaggttgacatcgggcaa

SEQ ID NO: 459 - DNA, 20 bp, Artificial Sequence
  Abl1 Reverse Primer
cacccacataaagaagcacg

SEQ ID NO: 460 - DNA, 20 bp, Artificial Sequence
  Abl1 Reverse Primer
tggcataaagatgacccaaa

SEQ ID NO: 461 - DNA, 20 bp, Artificial Sequence
  Abl1 Reverse Primer
gcccaatgtcctgaagtacg

SEQ ID NO: 462 - DNA, 20 bp, Artificial Sequence
  Abl1 Reverse Primer
cctgcatctgttccaaggtt

SEQ ID NO: 463 - DNA, 20 bp, Artificial Sequence
  Abl1 Reverse Primer
agtgatacgatcccacccaa

SEQ ID NO: 464 - DNA, 20 bp, Artificial Sequence
  Abl1 Reverse Primer
caaataagagccaagagcgg

SEQ ID NO: 465 - DNA, 20 bp, Artificial Sequence
  Abl1 Reverse Primer
aggcagaaggtggtgaagaa

SEQ ID NO: 466 - DNA, 19 bp, Artificial Sequence
  Abl1 Reverse Primer
actgtcagggcgggtaaac

SEQ ID NO: 467 - DNA, 20 bp, Artificial Sequence
  Abl1 Reverse Primer
cgtttcttttgacagccaca

SEQ ID NO: 468 - DNA, 20 bp, Artificial Sequence
  Abl1 Reverse Primer
aaaaccattctcccccaaag

SEQ ID NO: 469 - DNA, 20 bp, Artificial Sequence
  Abl1 Reverse Primer
atcagagcaccactcccatc

SEQ ID NO: 470 - DNA, 20 bp, Artificial Sequence
  Abl1 Reverse Primer
acaccatgagtcacgctcag

SEQ ID NO: 471 - DNA, 20 bp, Artificial Sequence
  Abl1 Reverse Primer
ttcttttgttttgcttgggg

SEQ ID NO: 472 - DNA, 20 bp, Artificial Sequence
  Abl1 Reverse Primer
agaagacttgcccaaactgc

SEQ ID NO: 473 - DNA, 20 bp, Artificial Sequence
  Abl1 Reverse Primer
tggacacaacagagctggag

SEQ ID NO: 474 - DNA, 20 bp, Artificial Sequence
  Abl1 Reverse Primer
acttggtgggtagttgctgg

SEQ ID NO: 475 - DNA, 20 bp, Artificial Sequence
  Abl1 Reverse Primer
aaggagctctccacacagga

SEQ ID NO: 476 - DNA, 20 bp, Artificial Sequence
  Abl1 Reverse Primer
tgtggaaacacactcggact

SEQ ID NO: 477 - DNA, 20 bp, Artificial Sequence
  Abl1 Reverse Primer
tcagccaacaaaaatccaca

SEQ ID NO: 478 - DNA, 24 bp, Artificial Sequence
  Abl1 Reverse Primer
gggtttcaaagaacttcaaaagaa

SEQ ID NO: 479 - DNA, 20 bp, Artificial Sequence
  Abl1 Reverse Primer
ttcccagaggtggatgtttc

SEQ ID NO: 480 - DNA, 20 bp, Artificial Sequence
  Abl1 Reverse Primer
caggcacgtgctgaataaga

SEQ ID NO: 481 - DNA, 20 bp, Artificial Sequence
  Abl1 Reverse Primer
cttgggtctggtcttcaacc

SEQ ID NO: 482 - DNA, 20 bp, Artificial Sequence
  Abl1 Reverse Primer
cagcaggtacccttctctgg

SEQ ID NO: 483 - DNA, 20 bp, Artificial Sequence
  Abl1 Reverse Primer
ccagaaagggacatactgcc

SEQ ID NO: 484 - DNA, 20 bp, Artificial Sequence
  Abl1 Reverse Primer
agagctgagctttggagctg

SEQ ID NO: 485 - DNA, 20 bp, Artificial Sequence
  Abl1 Reverse Primer
gcggttaaaagtaggccctt

SEQ ID NO: 486 - DNA, 20 bp, Artificial Sequence
  Abl1 Reverse Primer
agcacgtcctccctttaaca

SEQ ID NO: 487 - DNA, 20 bp, Artificial Sequence
  Abl1 Reverse Primer
cctatgggatgctgtcacct

SEQ ID NO: 488 - DNA, 20 bp, Artificial Sequence
  Abl1 Reverse Primer
acaactgccaagggtacgac

SEQ ID NO: 489 - DNA, 20 bp, Artificial Sequence
  Abl1 Reverse Primer
aagcaagtggggtttttctg

SEQ ID NO: 490 - DNA, 20 bp, Artificial Sequence
  Abl1 Reverse Primer
gaggctatgtgtcagcccat

SEQ ID NO: 491 - DNA, 20 bp, Artificial Sequence
  Abl1 Reverse Primer
gactgcaggggaacagagag

SEQ ID NO: 492 - DNA, 20 bp, Artificial Sequence
  Abl1 Reverse Primer
ggtcaagtctgaagtgccgt

SEQ ID NO: 493 - DNA, 20 bp, Artificial Sequence
  Abl1 Reverse Primer
gcaaacaccacaaacgtgac

SEQ ID NO: 494 - DNA, 20 bp, Artificial Sequence
  Abl1 Reverse Primer
cttcagcgcatactcgtcct

SEQ ID NO: 495 - DNA, 20 bp, Artificial Sequence
  Abl1 Reverse Primer
attccaacgaggttttgtgc

SEQ ID NO: 496 - DNA, 20 bp, Artificial Sequence
  Abl1 Reverse Primer
ggccaggctcttttcttctt

SEQ ID NO: 497 - DNA, 20 bp, Artificial Sequence
  Abl1 Reverse Primer
aggaggttcccgtaggtcat

SEQ ID NO: 498 - DNA, 20 bp, Artificial Sequence
  Abl1 Reverse Primer
ttgccaggagcctagtgttt

SEQ ID NO: 499 - DNA, 20 bp, Artificial Sequence
  Abl1 Reverse Primer
tgttcccatgagtttgcgta

SEQ ID NO: 500 - DNA, 19 bp, Artificial Sequence
  Abl1 Reverse Primer
aaagcccatcaggctctgt

SEQ ID NO: 501 - DNA, 20 bp, Artificial Sequence
  Abl1 Reverse Primer
tcaatttgcagcatcagagg

SEQ ID NO: 502 - DNA, 20 bp, Artificial Sequence
  Abl1 Reverse Primer
tcccagggaggtaggagtct

SEQ ID NO: 503 - DNA, 20 bp, Artificial Sequence
  Abl1 Reverse Primer
cctcatgacctggagcaagt

SEQ ID NO: 504 - DNA, 20 bp, Artificial Sequence
  Abl1 Reverse Primer
caccaagtggttctccccta

SEQ ID NO: 505 - DNA, 21 bp, Artificial Sequence
  Abl1 Reverse Primer
gccttaaaattccatttccca

SEQ ID NO: 506 - DNA, 20 bp, Artificial Sequence
  Abl1 Reverse Primer
acatgctagaggagggcaga

SEQ ID NO: 507 - DNA, 20 bp, Artificial Sequence
  Abl1 Reverse Primer
tgcacagttgaatttcctgg

SEQ ID NO: 508 - DNA, 20 bp, Artificial Sequence
  Abl1 Reverse Primer
caaagtgcccagagattcgt

SEQ ID NO: 509 - DNA, 20 bp, Artificial Sequence
  Abl1 Reverse Primer
ttcccagtcccgctctagta

SEQ ID NO: 510 - DNA, 20 bp, Artificial Sequence
  Abl1 Reverse Primer
acctggacagatgaaaccca

SEQ ID NO: 511 - DNA, 20 bp, Artificial Sequence
  Abl1 Reverse Primer
gcagcagacaagaaagcaca

SEQ ID NO: 512 - DNA, 20 bp, Artificial Sequence
  Abl1 Reverse Primer
cctgcagcaaggtactcaca

SEQ ID NO: 513 - DNA, 20 bp, Artificial Sequence
  Abl1 Reverse Primer
aagcacctctgcctacagga

SEQ ID NO: 514 - DNA, 20 bp, Artificial Sequence
  Abl1 Reverse Primer
atggcaccagaaagatgctc

SEQ ID NO: 515 - DNA, 20 bp, Artificial Sequence
  Abl1 Reverse Primer
gaggaggaagggtggaagat

SEQ ID NO: 516 - DNA, 20 bp, Artificial Sequence
  Abl1 Reverse Primer
ggttttctgttggcacctgt

SEQ ID NO: 517 - DNA, 19 bp, Artificial Sequence
  Abl1 Reverse Primer
gtgtccaagggggtgaaag

SEQ ID NO: 518 - DNA, 20 bp, Artificial Sequence
  Abl1 Reverse Primer
aggggttttggagtcaggtt

SEQ ID NO: 519 - DNA, 20 bp, Artificial Sequence
  Abl1 Reverse Primer
caggtttgagcctggacaat

SEQ ID NO: 520 - DNA, 20 bp, Artificial Sequence
  Abl1 Reverse Primer
tcgggttgatatgagaggga

SEQ ID NO: 521 - DNA, 20 bp, Artificial Sequence
  Abl1 Reverse Primer
ctgacacctgacccctgact

SEQ ID NO: 522 - DNA, 20 bp, Artificial Sequence
  Abl1 Reverse Primer
agacagtccacatcagccgt

SEQ ID NO: 523 - DNA, 20 bp, Artificial Sequence
  Abl1 Reverse Primer
ttagcaccctgttttccacc

SEQ ID NO: 524 - DNA, 20 bp, Artificial Sequence
  Abl1 Reverse Primer
gaaaggacggttcactctgg

SEQ ID NO: 525 - DNA, 20 bp, Artificial Sequence
  Abl1 Reverse Primer
tgaggctatgtcactcacgg

SEQ ID NO: 526 - DNA, 20 bp, Artificial Sequence
  Abl1 Reverse Primer
aaccgcataaaacgatccag

SEQ ID NO: 527 - DNA, 18 bp, Artificial Sequence
  Abl1 Reverse Primer
gagaagcagagggggagc

SEQ ID NO: 528 - DNA, 20 bp, Artificial Sequence
  Abl1 Reverse Primer
agtgcctgaaagatggctgt

SEQ ID NO: 529 - DNA, 18 bp, Artificial Sequence
  BCR Forward Primer
acctgccaccagggagtg

SEQ ID NO: 530 - DNA, 20 bp, Artificial Sequence
  BCR Forward Primer
gcatgatctacctgcagacg

SEQ ID NO: 531 - DNA, 20 bp, Artificial Sequence
  BCR Forward Primer
tgaacgtcgagtttcaccac

SEQ ID NO: 532 - DNA, 20 bp, Artificial Sequence
  BCR Forward Primer
gcttcctgaaggacaacctg

SEQ ID NO: 533 - DNA, 20 bp, Artificial Sequence
  BCR Forward Primer
tgtttggaatggaattgggt

SEQ ID NO: 534 - DNA, 20 bp, Artificial Sequence
  BCR Forward Primer
accccactgatcctgttctg

SEQ ID NO: 535 - DNA, 20 bp, Artificial Sequence
  BCR Forward Primer
tattcaccaccaggctcctc

SEQ ID NO: 536 - DNA, 20 bp, Artificial Sequence
  BCR Forward Primer
attggggtaaggaaagggtg

SEQ ID NO: 537 - DNA, 19 bp, Artificial Sequence
  BCR Forward Primer
caggcacatcagctcgttc

SEQ ID NO: 538 - DNA, 20 bp, Artificial Sequence
  BCR Forward Primer
tgtagacttggccatgttgg

SEQ ID NO: 539 - DNA, 20 bp, Artificial Sequence
  BCR Forward Primer
agccatctgtctctgcctgt

SEQ ID NO: 540 - DNA, 20 bp, Artificial Sequence
  BCR Forward Primer
ggtgacaaagtgcttcccat

SEQ ID NO: 541 - DNA, 20 bp, Artificial Sequence
  BCR Forward Primer
agagcccttcctccttttca

SEQ ID NO: 542 - DNA, 20 bp, Artificial Sequence
  BCR Forward Primer
tggcaaccagtttgagtgag

SEQ ID NO: 543 - DNA, 20 bp, Artificial Sequence
  BCR Forward Primer
agctgggagtgctgttgatt

SEQ ID NO: 544 - DNA, 20 bp, Artificial Sequence
  BCR Forward Primer
tttgagagggtcccctgttt

SEQ ID NO: 545 - DNA, 20 bp, Artificial Sequence
  BCR Forward Primer
gtttttgggggcctagtgat

SEQ ID NO: 546 - DNA, 20 bp, Artificial Sequence
  BCR Forward Primer
tcatagacccaccttcctgg

SEQ ID NO: 547 - DNA, 20 bp, Artificial Sequence
  BCR Forward Primer
acagaatgactttgcggagg

SEQ ID NO: 548 - DNA, 20 bp, Artificial Sequence
  BCR Forward Primer
tgtttcccctctcattttgc

SEQ ID NO: 549 - DNA, 20 bp, Artificial Sequence
  BCR Forward Primer
gagagagagagccaggcaga

SEQ ID NO: 550 - DNA, 22 bp, Artificial Sequence
  BCR Forward Primer
cagggacttaattctcccttga

SEQ ID NO: 551 - DNA, 20 bp, Artificial Sequence
  BCR Forward Primer
taaccagtatgagctccggg

SEQ ID NO: 552 - DNA, 20 bp, Artificial Sequence
  BCR Forward Primer
ggaggagtgacaggaaccct

SEQ ID NO: 553 - DNA, 20 bp, Artificial Sequence
  BCR Forward Primer
gaagccctgctctgattttg

SEQ ID NO: 554 - DNA, 20 bp, Artificial Sequence
  BCR Forward Primer
gtagcaggctctggttggag

SEQ ID NO: 555 - DNA, 21 bp, Artificial Sequence
  BCR Forward Primer
acctggagctgttgtcttgag

SEQ ID NO: 556 - DNA, 20 bp, Artificial Sequence
  BCR Forward Primer
gggaggtcacgtgagagaaa

SEQ ID NO: 557 - DNA, 20 bp, Artificial Sequence
  BCR Forward Primer
gagaggtggctgggttactg

SEQ ID NO: 558 - DNA, 20 bp, Artificial Sequence
  BCR Forward Primer
ctggtttcctctctcatggc

SEQ ID NO: 559 - DNA, 20 bp, Artificial Sequence
  BCR Forward Primer
agcttgaggcttcttgtgga

SEQ ID NO: 560 - DNA, 20 bp, Artificial Sequence
  BCR Forward Primer
ttcagacccttcggtttctg

SEQ ID NO: 561 - DNA, 25 bp, Artificial Sequence
  BCR Forward Primer
gggccatattattactttgtagtgg

SEQ ID NO: 562 - DNA, 20 bp, Artificial Sequence
  BCR Forward Primer
ggtcagagaggtggatggtc

SEQ ID NO: 563 - DNA, 20 bp, Artificial Sequence
  BCR Forward Primer
tccttgatgaccctcgaaac

SEQ ID NO: 564 - DNA, 20 bp, Artificial Sequence
  BCR Forward Primer
aggacaaacacctccctgtg

SEQ ID NO: 565 - DNA, 20 bp, Artificial Sequence
  BCR Forward Primer
agctgaatggcagcattttt

SEQ ID NO: 566 - DNA, 20 bp, Artificial Sequence
  BCR Forward Primer
ccaccaggactggaacagat

SEQ ID NO: 567 - DNA, 20 bp, Artificial Sequence
  BCR Forward Primer
gatgaccaattccccaacag

SEQ ID NO: 568 - DNA, 20 bp, Artificial Sequence
  BCR Forward Primer
cctgaagaccctccttctcc

SEQ ID NO: 569 - DNA, 20 bp, Artificial Sequence
  BCR Forward Primer
aggatcagaagctcaggcag

SEQ ID NO: 570 - DNA, 20 bp, Artificial Sequence
  BCR Forward Primer
ggaggagaggccttctaagc

SEQ ID NO: 571 - DNA, 20 bp, Artificial Sequence
  BCR Forward Primer
cccatctgtacccacctttg

SEQ ID NO: 572 - DNA, 20 bp, Artificial Sequence
  BCR Forward Primer
cagttccttcttgagcctgg

SEQ ID NO: 573 - DNA, 20 bp, Artificial Sequence
  BCR Forward Primer
tcaaagtgggatcccttcac

SEQ ID NO: 574 - DNA, 20 bp, Artificial Sequence
  BCR Forward Primer
tccaattctgatggagaggg

SEQ ID NO: 575 - DNA, 20 bp, Artificial Sequence
  BCR Forward Primer
cagccatctctccacagaca

SEQ ID NO: 576 - DNA, 20 bp, Artificial Sequence
  BCR Forward Primer
gatagcgggagaggatgttg

SEQ ID NO: 577 - DNA, 20 bp, Artificial Sequence
  BCR Forward Primer
gatgaaagaggagccacagg

SEQ ID NO: 578 - DNA, 20 bp, Artificial Sequence
  BCR Forward Primer
atccattggtggatggacac

SEQ ID NO: 579 - DNA, 20 bp, Artificial Sequence
  BCR Forward Primer
aaagagggcgggaattctta

SEQ ID NO: 580 - DNA, 20 bp, Artificial Sequence
  BCR Forward Primer
aggggaccagttaatccagg

SEQ ID NO: 581 - DNA, 20 bp, Artificial Sequence
  BCR Forward Primer
ggtccagtctgagtggctct

SEQ ID NO: 582 - DNA, 20 bp, Artificial Sequence
  BCR Forward Primer
ttgcttcccccttttctttt

SEQ ID NO: 583 - DNA, 20 bp, Artificial Sequence
  BCR Forward Primer
gaggtggcctaaccgttgta

SEQ ID NO: 584 - DNA, 20 bp, Artificial Sequence
  BCR Forward Primer
gctcccaccacaggatttta

SEQ ID NO: 585 - DNA, 20 bp, Artificial Sequence
  BCR Forward Primer
gataggccttgggttcaaca

SEQ ID NO: 586 - DNA, 22 bp, Artificial Sequence
  BCR Forward Primer
ttttgaaggtcattgttttcct

SEQ ID NO: 587 - DNA, 20 bp, Artificial Sequence
  BCR Forward Primer
cttgacgtccagatcctgct

SEQ ID NO: 588 - DNA, 20 bp, Artificial Sequence
  BCR Forward Primer
atgtgaggattgcaggaggt

SEQ ID NO: 589 - DNA, 20 bp, Artificial Sequence
  BCR Forward Primer
gtggctgttcttcagctgtg

SEQ ID NO: 590 - DNA, 20 bp, Artificial Sequence
  BCR Forward Primer
cgttatggagctgagaaggc

SEQ ID NO: 591 - DNA, 20 bp, Artificial Sequence
  BCR Forward Primer
catccctatgtggaacccag

SEQ ID NO: 592 - DNA, 20 bp, Artificial Sequence
  BCR Forward Primer
cagctccctcctctctgcta

SEQ ID NO: 593 - DNA, 20 bp, Artificial Sequence
  BCR Forward Primer
gggctccctttggtacttgt

SEQ ID NO: 594 - DNA, 20 bp, Artificial Sequence
  BCR Forward Primer
tggggaccaacaggatctac

SEQ ID NO: 595 - DNA, 20 bp, Artificial Sequence
  BCR Forward Primer
ccaggttgggttcaggtatg

SEQ ID NO: 596 - DNA, 20 bp, Artificial Sequence
  BCR Forward Primer
atgcatcagagagagcagcc

SEQ ID NO: 597 - DNA, 20 bp, Artificial Sequence
  BCR Forward Primer
ggcctctttgggttgaattt

SEQ ID NO: 598 - DNA, 20 bp, Artificial Sequence
  BCR Forward Primer
cttaggaccagagcaggtgg

SEQ ID NO: 599 - DNA, 20 bp, Artificial Sequence
  BCR Forward Primer
ggagcaagtttcctgcagtc

SEQ ID NO: 600 - DNA, 20 bp, Artificial Sequence
  BCR Forward Primer
gaggaaggaggcagaggagt

SEQ ID NO: 601 - DNA, 20 bp, Artificial Sequence
  BCR Forward Primer
taagggaattggggtgtgag

SEQ ID NO: 602 - DNA, 20 bp, Artificial Sequence
  BCR Forward Primer
atatccaaagccctgtgtgc

SEQ ID NO: 603 - DNA, 20 bp, Artificial Sequence
  BCR Forward Primer
accttttccttcctttcccc

SEQ ID NO: 604 - DNA, 20 bp, Artificial Sequence
  BCR Forward Primer
cagggactgactccacaaca

SEQ ID NO: 605 - DNA, 20 bp, Artificial Sequence
  BCR Forward Primer
cttgtgcctccaggagagtc

SEQ ID NO: 606 - DNA, 19 bp, Artificial Sequence
  BCR Forward Primer
gggctggagcaagtgttct

SEQ ID NO: 607 - DNA, 20 bp, Artificial Sequence
  BCR Forward Primer
ccggaattgacttgactggt

SEQ ID NO: 608 - DNA, 20 bp, Artificial Sequence
  BCR Forward Primer
tccttcagtctgcattggtg

SEQ ID NO: 609 - DNA, 20 bp, Artificial Sequence
  BCR Forward Primer
cttttctggcctttgctgtc

SEQ ID NO: 610 - DNA, 20 bp, Artificial Sequence
  BCR Forward Primer
ggtttgggggagattgaagt

SEQ ID NO: 611 - DNA, 20 bp, Artificial Sequence
  BCR Forward Primer
tgtgccaggcatagcaatag

SEQ ID NO: 612 - DNA, 20 bp, Artificial Sequence
  BCR Forward Primer
aacactgggatgagctgtca

SEQ ID NO: 613 - DNA, 20 bp, Artificial Sequence
  BCR Forward Primer
gtttccagggtggttcttga

SEQ ID NO: 614 - DNA, 20 bp, Artificial Sequence
  BCR Forward Primer
gctgttgaccactgagggat

SEQ ID NO: 615 - DNA, 20 bp, Artificial Sequence
  BCR Forward Primer
ctgttgctgtgctggtgaag

SEQ ID NO: 616 - DNA, 20 bp, Artificial Sequence
  BCR Forward Primer
aaatcactgccaaggtgtcc

SEQ ID NO: 617 - DNA, 20 bp, Artificial Sequence
  BCR Forward Primer
ccagggtttgctcattgtct

SEQ ID NO: 618 - DNA, 20 bp, Artificial Sequence
  BCR Forward Primer
acgcagttgttttggacaca

SEQ ID NO: 619 - DNA, 20 bp, Artificial Sequence
  BCR Forward Primer
catggtgttaaaaggcccat

SEQ ID NO: 620 - DNA, 20 bp, Artificial Sequence
  BCR Forward Primer
cctgtcttgtctctccagcc

SEQ ID NO: 621 - DNA, 20 bp, Artificial Sequence
  BCR Forward Primer
aacgtgctaaggtcacccac

SEQ ID NO: 622 - DNA, 20 bp, Artificial Sequence
  BCR Forward Primer
tcctccttcaggtgagatgg

SEQ ID NO: 623 - DNA, 20 bp, Artificial Sequence
  BCR Forward Primer
catccacatcagagtcccct

SEQ ID NO: 624 - DNA, 19 bp, Artificial Sequence
  BCR Forward Primer
catggtgacttcacctgcc

SEQ ID NO: 625 - DNA, 20 bp, Artificial Sequence
  BCR Forward Primer
gtgtcattaatggcgtgtgc

SEQ ID NO: 626 - DNA, 20 bp, Artificial Sequence
  BCR Forward Primer
tctacagaacccatggtccc

SEQ ID NO: 627 - DNA, 20 bp, Artificial Sequence
  BCR Forward Primer
aagactcagggaggccatct

SEQ ID NO: 628 - DNA, 20 bp, Artificial Sequence
  BCR Forward Primer
cggagcctacaggaaagttg

SEQ ID NO: 629 - DNA, 20 bp, Artificial Sequence
  BCR Forward Primer
tggcttgttaacccagctct

SEQ ID NO: 630 - DNA, 20 bp, Artificial Sequence
  BCR Forward Primer
atgtttgtctgcactgctgc

SEQ ID NO: 631 - DNA, 20 bp, Artificial Sequence
  BCR Forward Primer
actttaggcagtcagctggg

SEQ ID NO: 632 - DNA, 20 bp, Artificial Sequence
  BCR Forward Primer
aagaagtgccaggctcagaa

SEQ ID NO: 633 - DNA, 20 bp, Artificial Sequence
  BCR Forward Primer
gtcacacccacaatgacagc

SEQ ID NO: 634 - DNA, 20 bp, Artificial Sequence
  BCR Forward Primer
cagtggcctgagcagataca

SEQ ID NO: 635 - DNA, 20 bp, Artificial Sequence
  BCR Forward Primer
agggggatgatcgaagaaag

SEQ ID NO: 636 - DNA, 20 bp, Artificial Sequence
  BCR Forward Primer
cagctcacccctagttcagc

SEQ ID NO: 637 - DNA, 20 bp, Artificial Sequence
  BCR Forward Primer
gggggtgggaattacagact

SEQ ID NO: 638 - DNA, 20 bp, Artificial Sequence
  BCR Forward Primer
acctgtcagcttggatgagg

SEQ ID NO: 639 - DNA, 20 bp, Artificial Sequence
  BCR Forward Primer
agaggagagcccaagagagc

SEQ ID NO: 640 - DNA, 20 bp, Artificial Sequence
  BCR Forward Primer
ctgggaatgtggtgaatgtg

SEQ ID NO: 641 - DNA, 20 bp, Artificial Sequence
  BCR Forward Primer
tcctcctttgaagggcacta

SEQ ID NO: 642 - DNA, 20 bp, Artificial Sequence
  BCR Forward Primer
gtgccacactcagatgtgct

SEQ ID NO: 643 - DNA, 20 bp, Artificial Sequence
  BCR Forward Primer
tttccaggtaaggtcgcatt

SEQ ID NO: 644 - DNA, 20 bp, Artificial Sequence
  BCR Forward Primer
aaaccttcagggtctccagg

SEQ ID NO: 645 - DNA, 20 bp, Artificial Sequence
  BCR Forward Primer
caggggatggtcctttaaca

SEQ ID NO: 646 - DNA, 20 bp, Artificial Sequence
  BCR Forward Primer
atctgcggtgtctagggttg

SEQ ID NO: 647 - DNA, 20 bp, Artificial Sequence
  BCR Forward Primer
tacccttccaccacagaacc

SEQ ID NO: 648 - DNA, 20 bp, Artificial Sequence
  BCR Forward Primer
ggaatgaaagttgacccagc

SEQ ID NO: 649 - DNA, 20 bp, Artificial Sequence
  BCR Forward Primer
agcccttctcgagggtagag

SEQ ID NO: 650 - DNA, 20 bp, Artificial Sequence
  BCR Forward Primer
atgtccgcctctgtgaaaac

SEQ ID NO: 651 - DNA, 20 bp, Artificial Sequence
  BCR Forward Primer
attgttctgggtagggaggg

SEQ ID NO: 652 - DNA, 20 bp, Artificial Sequence
  BCR Forward Primer
agtctaggggatgtgaccgc

SEQ ID NO: 653 - DNA, 20 bp, Artificial Sequence
  BCR Forward Primer
ctgcactggacttcctctcc

SEQ ID NO: 654 - DNA, 20 bp, Artificial Sequence
  BCR Forward Primer
cttaggggagctcaggtgtg

SEQ ID NO: 655 - DNA, 19 bp, Artificial Sequence
  BCR Forward Primer
gagcaggccatctggaatc

SEQ ID NO: 656 - DNA, 20 bp, Artificial Sequence
  BCR Forward Primer
aggttttagcgtggacgttg

SEQ ID NO: 657 - DNA, 20 bp, Artificial Sequence
  BCR Forward Primer
ggcctcagtgacctggacta

SEQ ID NO: 658 - DNA, 20 bp, Artificial Sequence
  BCR Forward Primer
gcctcttcctggaattctcc

SEQ ID NO: 659 - DNA, 20 bp, Artificial Sequence
  BCR Forward Primer
ccacagctagtggcagatca

SEQ ID NO: 660 - DNA, 20 bp, Artificial Sequence
  BCR Forward Primer
gtggagaagggatcctcaca

SEQ ID NO: 661 - DNA, 20 bp, Artificial Sequence
  BCR Forward Primer
gggggcctcttgtaggataa

SEQ ID NO: 662 - DNA, 20 bp, Artificial Sequence
  BCR Forward Primer
ggggcagacgtatctcagaa

SEQ ID NO: 663 - DNA, 20 bp, Artificial Sequence
  BCR Forward Primer
ctttgcacacacagatggct

SEQ ID NO: 664 - DNA, 20 bp, Artificial Sequence
  BCR Forward Primer
gctcaggggtatgtagcagg

SEQ ID NO: 665 - DNA, 20 bp, Artificial Sequence
  BCR Forward Primer
ttaccaaagcgtgtgctgag

SEQ ID NO: 666 - DNA, 20 bp, Artificial Sequence
  BCR Forward Primer
ctgattcctcttgctggtcc

SEQ ID NO: 667 - DNA, 20 bp, Artificial Sequence
  BCR Forward Primer
atttctgaaggccttggtgc

SEQ ID NO: 668 - DNA, 20 bp, Artificial Sequence
  BCR Forward Primer
ttcctgattcttcaatgggc

SEQ ID NO: 669 - DNA, 20 bp, Artificial Sequence
  BCR Forward Primer
ctcctctgtgaagccactcc

SEQ ID NO: 670 - DNA, 20 bp, Artificial Sequence
  BCR Forward Primer
cccttcactgctctggagac

SEQ ID NO: 671 - DNA, 20 bp, Artificial Sequence
  BCR Forward Primer
gtgggaaggattcacacagg

SEQ ID NO: 672 - DNA, 20 bp, Artificial Sequence
  BCR Forward Primer
aagcccagtttgttttgtgg

SEQ ID NO: 673 - DNA, 20 bp, Artificial Sequence
  BCR Forward Primer
tgccatcagcactattcagg

SEQ ID NO: 674 - DNA, 20 bp, Artificial Sequence
  BCR Forward Primer
cacaagcatctcacactggg

SEQ ID NO: 675 - DNA, 20 bp, Artificial Sequence
  BCR Forward Primer
attcatgatgggcagagagg

SEQ ID NO: 676 - DNA, 20 bp, Artificial Sequence
  BCR Forward Primer
tcgtgttgaacctgctgtct

SEQ ID NO: 677 - DNA, 20 bp, Artificial Sequence
  BCR Forward Primer
aggtagaggcaaggatgctg

SEQ ID NO: 678 - DNA, 20 bp, Artificial Sequence
  BCR Forward Primer
gcacccacacactttcctct

SEQ ID NO: 679 - DNA, 20 bp, Artificial Sequence
  BCR Forward Primer
gtaagagggtccctgccagt

SEQ ID NO: 680 - DNA, 20 bp, Artificial Sequence
  BCR Forward Primer
ggtcagagcctccttctcct

SEQ ID NO: 681 - DNA, 20 bp, Artificial Sequence
  BCR Forward Primer
acccttccaggctgacttct

SEQ ID NO: 682 - DNA, 20 bp, Artificial Sequence
  BCR Forward Primer
caggtcagctgtcagagcct

SEQ ID NO: 683 - DNA, 20 bp, Artificial Sequence
  BCR Forward Primer
gggctgagttttctgctctg

SEQ ID NO: 684 - DNA, 20 bp, Artificial Sequence
  BCR Forward Primer
tccagagctctttgccagat

SEQ ID NO: 685 - DNA, 20 bp, Artificial Sequence
  BCR Forward Primer
aggaactcgtgatccacgtc

SEQ ID NO: 686 - DNA, 20 bp, Artificial Sequence
  BCR Forward Primer
cacaagaagttttccccctg

SEQ ID NO: 687 - DNA, 20 bp, Artificial Sequence
  BCR Forward Primer
gcccagacaaccttgacatt

SEQ ID NO: 688 - DNA, 20 bp, Artificial Sequence
  BCR Forward Primer
gagtcctcttcccaagaccc

SEQ ID NO: 689 - DNA, 20 bp, Artificial Sequence
  BCR Forward Primer
gtgacaaggcctaaagcagg

SEQ ID NO: 690 - DNA, 20 bp, Artificial Sequence
  BCR Forward Primer
cttcttgcagcccttgtagg

SEQ ID NO: 691 - DNA, 20 bp, Artificial Sequence
  BCR Forward Primer
gctgcccataaaggtgttgt

SEQ ID NO: 692 - DNA, 20 bp, Artificial Sequence
  BCR Forward Primer
ttgtgtctgtgcagtgggag

SEQ ID NO: 693 - DNA, 20 bp, Artificial Sequence
  BCR Forward Primer
aatggggtgggaggaataag

SEQ ID NO: 694 - DNA, 20 bp, Artificial Sequence
  BCR Forward Primer
cagcacctgtcccactctct

SEQ ID NO: 695 - DNA, 20 bp, Artificial Sequence
  BCR Forward Primer
ccagattctgttgggttcgt

SEQ ID NO: 696 - DNA, 18 bp, Artificial Sequence
  BCR Forward Primer
gtacctggcactggaggc

SEQ ID NO: 697 - DNA, 20 bp, Artificial Sequence
  BCR Forward Primer
caaaccatgtggtgttagcg

SEQ ID NO: 698 - DNA, 20 bp, Artificial Sequence
  BCR Forward Primer
tttgttgctgaggctttgtg

SEQ ID NO: 699 - DNA, 20 bp, Artificial Sequence
  BCR Forward Primer
ggtggcatcgaatttcaagt

SEQ ID NO: 700 - DNA, 20 bp, Artificial Sequence
  BCR Forward Primer
cgacatgcactttggttctc

SEQ ID NO: 701 - DNA, 20 bp, Artificial Sequence
  BCR Forward Primer
tacatgaaaagggctttggg

SEQ ID NO: 702 - DNA, 20 bp, Artificial Sequence
  BCR Forward Primer
aaggtaccaaagtgcatggc

SEQ ID NO: 703 - DNA, 20 bp, Artificial Sequence
  BCR Forward Primer
cttacaagccctgcttttgc

SEQ ID NO: 704 - DNA, 20 bp, Artificial Sequence
  BCR Forward Primer
tataggtagaggccagggca

SEQ ID NO: 705 - DNA, 20 bp, Artificial Sequence
  BCR Forward Primer
cagaagcaacaaagatgcca

SEQ ID NO: 706 - DNA, 20 bp, Artificial Sequence
  BCR Forward Primer
ggcaggaattgagtccagag

SEQ ID NO: 707 - DNA, 20 bp, Artificial Sequence
  BCR Forward Primer
tgtcatcatggagaagcacg

SEQ ID NO: 708 - DNA, 20 bp, Artificial Sequence
  BCR Forward Primer
agcaggtctccctccagaat

SEQ ID NO: 709 - DNA, 18 bp, Artificial Sequence
  BCR Forward Primer
actcacccttgcaccgag

SEQ ID NO: 710 - DNA, 20 bp, Artificial Sequence
  BCR Forward Primer
ggcccaagtgagagagactg

SEQ ID NO: 711 - DNA, 20 bp, Artificial Sequence
  BCR Forward Primer
agaccttgccttctgggatt

SEQ ID NO: 712 - DNA, 20 bp, Artificial Sequence
  BCR Forward Primer
aggtgagtaggaggatggca

SEQ ID NO: 713 - DNA, 20 bp, Artificial Sequence
  BCR Forward Primer
ggcacataatgaggcagatg

SEQ ID NO: 714 - DNA, 22 bp, Artificial Sequence
  BCR Forward Primer
cacctccttctctttcttctgg

SEQ ID NO: 715 - DNA, 20 bp, Artificial Sequence
  BCR Forward Primer
tgagggacttggtcaggttt

SEQ ID NO: 716 - DNA, 20 bp, Artificial Sequence
  BCR Forward Primer
ttgagcagtgcaagtgttcc

SEQ ID NO: 717 - DNA, 20 bp, Artificial Sequence
  BCR Forward Primer
tggcttctcctgtgcctagt

SEQ ID NO: 718 - DNA, 20 bp, Artificial Sequence
  BCR Forward Primer
atagatgcctgtgctttgcc

SEQ ID NO: 719 - DNA, 20 bp, Artificial Sequence
  BCR Forward Primer
ctctctgagggcaatgatgc

SEQ ID NO: 720 - DNA, 20 bp, Artificial Sequence
  BCR Forward Primer
ataggacgtttccacccctc

SEQ ID NO: 721 - DNA, 20 bp, Artificial Sequence
  BCR Forward Primer
ccccactgtggctcctataa

SEQ ID NO: 722 - DNA, 20 bp, Artificial Sequence
  BCR Forward Primer
atagcggacgatccagtttg

SEQ ID NO: 723 - DNA, 20 bp, Artificial Sequence
  BCR Forward Primer
taagtgcaaggctagtgccc

SEQ ID NO: 724 - DNA, 20 bp, Artificial Sequence
  BCR Forward Primer
acccagaaagagctcagcaa

SEQ ID NO: 725 - DNA, 20 bp, Artificial Sequence
  BCR Forward Primer
aagctccaccttggtcttca

SEQ ID NO: 726 - DNA, 20 bp, Artificial Sequence
  BCR Forward Primer
cattggagttagggcctcag

SEQ ID NO: 727 - DNA, 20 bp, Artificial Sequence
  BCR Forward Primer
ctcctcagaagacagggcac

SEQ ID NO: 728 - DNA, 20 bp, Artificial Sequence
  BCR Forward Primer
gactggtctttctcacccca

SEQ ID NO: 729 - DNA, 19 bp, Artificial Sequence
  BCR Forward Primer
cacacggggttacttgcac

SEQ ID NO: 730 - DNA, 20 bp, Artificial Sequence
  BCR Forward Primer
ataggatcttcccctgtgcc

SEQ ID NO: 731 - DNA, 20 bp, Artificial Sequence
  BCR Forward Primer
ctgggcagggagtgacatag

SEQ ID NO: 732 - DNA, 20 bp, Artificial Sequence
  BCR Forward Primer
gtgctacaggtccccagtgt

SEQ ID NO: 733 - DNA, 20 bp, Artificial Sequence
  BCR Forward Primer
cttcagcgctccagctctac

SEQ ID NO: 734 - DNA, 20 bp, Artificial Sequence
  BCR Forward Primer
cagaatgggggaaaagttca

SEQ ID NO: 735 - DNA, 20 bp, Artificial Sequence
  BCR Forward Primer
ctgtgagccttccctgagac

SEQ ID NO: 736 - DNA, 20 bp, Artificial Sequence
  BCR Forward Primer
gatgcagaccaagatgcaga

SEQ ID NO: 737 - DNA, 20 bp, Artificial Sequence
  BCR Forward Primer
actgtttgcttggctgtgtg

SEQ ID NO: 738 - DNA, 20 bp, Artificial Sequence
  BCR Forward Primer
atgtctctgggtcaacctgc

SEQ ID NO: 739 - DNA, 20 bp, Artificial Sequence
  BCR Forward Primer
caggtcatggagggtcttgt

SEQ ID NO: 740 - DNA, 20 bp, Artificial Sequence
  BCR Forward Primer
tggtggctttccgagttatc

SEQ ID NO: 741 - DNA, 21 bp, Artificial Sequence
  BCR Forward Primer
cgccagctagatctgtagtcc

SEQ ID NO: 742 - DNA, 20 bp, Artificial Sequence
  BCR Forward Primer
aacacgtgctgggttttagg

SEQ ID NO: 743 - DNA, 20 bp, Artificial Sequence
  BCR Forward Primer
gagagaaggtgcacaccagg

SEQ ID NO: 744 - DNA, 20 bp, Artificial Sequence
  BCR Forward Primer
ggtctcctgatacccaggct

SEQ ID NO: 745 - DNA, 20 bp, Artificial Sequence
  BCR Forward Primer
aagcccctcaatcaaaggtt

SEQ ID NO: 746 - DNA, 20 bp, Artificial Sequence
  BCR Forward Primer
tgacaggcagcacagttttc

SEQ ID NO: 747 - DNA, 20 bp, Artificial Sequence
  BCR Forward Primer
tttgggaaaatgaaaggcag

SEQ ID NO: 748 - DNA, 20 bp, Artificial Sequence
  BCR Forward Primer
aggagtcactgctgctgctt

SEQ ID NO: 749 - DNA, 20 bp, Artificial Sequence
  BCR Forward Primer
ccttctgtcctgagtctggc

SEQ ID NO: 750 - DNA, 20 bp, Artificial Sequence
  BCR Forward Primer
agttcgggtgagagatggtg

SEQ ID NO: 751 - DNA, 20 bp, Artificial Sequence
  BCR Forward Primer
tatgagcgtgcagagtggag

SEQ ID NO: 752 - DNA, 20 bp, Artificial Sequence
  BCR Forward Primer
ccatctccccctagtctgct

SEQ ID NO: 753 - DNA, 20 bp, Artificial Sequence
  BCR Forward Primer
ctccttggaggtttgggatt

SEQ ID NO: 754 - DNA, 20 bp, Artificial Sequence
  BCR Forward Primer
taagccccttttcctcacct

SEQ ID NO: 755 - DNA, 20 bp, Artificial Sequence
  BCR Forward Primer
tgcacctcttttccaacctc

SEQ ID NO: 756 - DNA, 20 bp, Artificial Sequence
  BCR Forward Primer
tggacaaggtgggttaggag

SEQ ID NO: 757 - DNA, 20 bp, Artificial Sequence
  BCR Forward Primer
gctcagtcacacacacagca

SEQ ID NO: 758 - DNA, 20 bp, Artificial Sequence
  BCR Forward Primer
ggaattgtttttcccggagt

SEQ ID NO: 759 - DNA, 20 bp, Artificial Sequence
  BCR Forward Primer
gctgtttgcgctcacattta

SEQ ID NO: 760 - DNA, 20 bp, Artificial Sequence
  BCR Forward Primer
ctctccttgcctccctgtta

SEQ ID NO: 761 - DNA, 20 bp, Artificial Sequence
  BCR Forward Primer
tctaaaatgcaaaccccacc

SEQ ID NO: 762 - DNA, 20 bp, Artificial Sequence
  BCR Forward Primer
ctctgctgtggcatcactgt

SEQ ID NO: 763 - DNA, 20 bp, Artificial Sequence
  BCR Forward Primer
ggaacgaggtgaggaactga

SEQ ID NO: 764 - DNA, 20 bp, Artificial Sequence
  BCR Forward Primer
tagggtcctgcttgcttgtc

SEQ ID NO: 765 - DNA, 19 bp, Artificial Sequence
  BCR Forward Primer
tgatgctgcaggtagaggc

SEQ ID NO: 766 - DNA, 20 bp, Artificial Sequence
  BCR Forward Primer
gtagctctggacatccctgc

SEQ ID NO: 767 - DNA, 20 bp, Artificial Sequence
  BCR Forward Primer
aaattcctgctgcttgcttc

SEQ ID NO: 768 - DNA, 20 bp, Artificial Sequence
  BCR Forward Primer
ggctctgaaacatccatcgt

SEQ ID NO: 769 - DNA, 20 bp, Artificial Sequence
  BCR Forward Primer
ccaggtgagaccgagaatgt

SEQ ID NO: 770 - DNA, 20 bp, Artificial Sequence
  BCR Forward Primer
catcgctcccacttctctct

SEQ ID NO: 771 - DNA, 20 bp, Artificial Sequence
  BCR Forward Primer
tgggggtctcagtgaaagag

SEQ ID NO: 772 - DNA, 20 bp, Artificial Sequence
  BCR Forward Primer
gcctgggttctttccagtct

SEQ ID NO: 773 - DNA, 20 bp, Artificial Sequence
  BCR Forward Primer
agtcagacctgctggcttgt

SEQ ID NO: 774 - DNA, 20 bp, Artificial Sequence
  BCR Forward Primer
tctgccaactgtggtgactc

SEQ ID NO: 775 - DNA, 20 bp, Artificial Sequence
  BCR Forward Primer
gggagaggggtcttcttgtt

SEQ ID NO: 776 - DNA, 20 bp, Artificial Sequence
  BCR Forward Primer
tgtatccccttgcctttctg

SEQ ID NO: 777 - DNA, 20 bp, Artificial Sequence
  BCR Forward Primer
cctcatggttggatctggac

SEQ ID NO: 778 - DNA, 20 bp, Artificial Sequence
  BCR Forward Primer
tccctgtgcagaaaacagtg

SEQ ID NO: 779 - DNA, 20 bp, Artificial Sequence
  BCR Forward Primer
ggttctctggtggtctcagc

SEQ ID NO: 780 - DNA, 20 bp, Artificial Sequence
  BCR Forward Primer
attggtgactcaatccagcc

SEQ ID NO: 781 - DNA, 20 bp, Artificial Sequence
  BCR Forward Primer
cattctttcaaggctcctgc

SEQ ID NO: 782 - DNA, 20 bp, Artificial Sequence
  BCR Forward Primer
gagagcgtaccagccttgag

SEQ ID NO: 783 - DNA, 20 bp, Artificial Sequence
  BCR Forward Primer
ctgggagtggtgcagatttt

SEQ ID NO: 784 - DNA, 18 bp, Artificial Sequence
  BCR Forward Primer
accttggccagccagact

SEQ ID NO: 785 - DNA, 19 bp, Artificial Sequence
  BCR Reverse Primer
ctctgagtccgggaactgc

SEQ ID NO: 786 - DNA, 19 bp, Artificial Sequence
  BCR Reverse Primer
ccttacccggagaaccctc

SEQ ID NO: 787 - DNA, 19 bp, Artificial Sequence
  BCR Reverse Primer
aactcggcgtcctcgtagt

SEQ ID NO: 788 - DNA, 20 bp, Artificial Sequence
  BCR Reverse Primer
ctccgcaatcctcaaaactc

SEQ ID NO: 789 - DNA, 20 bp, Artificial Sequence
  BCR Reverse Primer
gtgggcgctagagatgactc

SEQ ID NO: 790 - DNA, 20 bp, Artificial Sequence
  BCR Reverse Primer
catgcagttgattttcggtg

SEQ ID NO: 791 - DNA, 20 bp, Artificial Sequence
  BCR Reverse Primer
cccaaaatgcctgatggtat

SEQ ID NO: 792 - DNA, 20 bp, Artificial Sequence
  BCR Reverse Primer
agagtgcccaccacaaaaag

SEQ ID NO: 793 - DNA, 20 bp, Artificial Sequence
  BCR Reverse Primer
aaacccagaattctccacca

SEQ ID NO: 794 - DNA, 20 bp, Artificial Sequence
  BCR Reverse Primer
ctgtgggaccttgaggacat

SEQ ID NO: 795 - DNA, 20 bp, Artificial Sequence
  BCR Reverse Primer
ctcaacttggaaatgggacg

SEQ ID NO: 796 - DNA, 20 bp, Artificial Sequence
  BCR Reverse Primer
gttgtgctttgcaggtagca

SEQ ID NO: 797 - DNA, 20 bp, Artificial Sequence
  BCR Reverse Primer
aaactgcctagccaaccaga

SEQ ID NO: 798 - DNA, 20 bp, Artificial Sequence
  BCR Reverse Primer
tctgcttctgtgctgctgat

SEQ ID NO: 799 - DNA, 20 bp, Artificial Sequence
  BCR Reverse Primer
gtcctctcccaagtgtgctc

SEQ ID NO: 800 - DNA, 23 bp, Artificial Sequence
  BCR Reverse Primer
aaaaacctacttgagccacaaca

SEQ ID NO: 801 - DNA, 20 bp, Artificial Sequence
  BCR Reverse Primer
gtcattttgcaaagtcgtgg

SEQ ID NO: 802 - DNA, 20 bp, Artificial Sequence
  BCR Reverse Primer
ctccaccaaccacttgacct

SEQ ID NO: 803 - DNA, 20 bp, Artificial Sequence
  BCR Reverse Primer
cagactaaaggctggggtca

SEQ ID NO: 804 - DNA, 20 bp, Artificial Sequence
  BCR Reverse Primer
tgcacaacagaccactgtca

SEQ ID NO: 805 - DNA, 20 bp, Artificial Sequence
  BCR Reverse Primer
gttgcttcgaatgctcatca

SEQ ID NO: 806 - DNA, 21 bp, Artificial Sequence
  BCR Reverse Primer
gctgagccaagtgagtgaaat

SEQ ID NO: 807 - DNA, 20 bp, Artificial Sequence
  BCR Reverse Primer
tgcagcaggctacacaaagt

SEQ ID NO: 808 - DNA, 20 bp, Artificial Sequence
  BCR Reverse Primer
gcctcagggacagagaactg

SEQ ID NO: 809 - DNA, 21 bp, Artificial Sequence
  BCR Reverse Primer
tccaaaaacaaatgtggacaa

SEQ ID NO: 810 - DNA, 20 bp, Artificial Sequence
  BCR Reverse Primer
ttttgccaaactcaccttcc

SEQ ID NO: 811 - DNA, 20 bp, Artificial Sequence
  BCR Reverse Primer
cacgcttctgtccttcctct

SEQ ID NO: 812 - DNA, 20 bp, Artificial Sequence
  BCR Reverse Primer
cactcggaccctaatcctga

SEQ ID NO: 813 - DNA, 20 bp, Artificial Sequence
  BCR Reverse Primer
cagcatcacgttcctcttca

SEQ ID NO: 814 - DNA, 20 bp, Artificial Sequence
  BCR Reverse Primer
gagactgtggccttagcagg

SEQ ID NO: 815 - DNA, 20 bp, Artificial Sequence
  BCR Reverse Primer
ccattttcccctctcctttc

SEQ ID NO: 816 - DNA, 20 bp, Artificial Sequence
  BCR Reverse Primer
ggacacccaactacacagca

SEQ ID NO: 817 - DNA, 20 bp, Artificial Sequence
  BCR Reverse Primer
cccattaaattggctgcttt

SEQ ID NO: 818 - DNA, 20 bp, Artificial Sequence
  BCR Reverse Primer
ggatttttggagggtaaggc

SEQ ID NO: 819 - DNA, 20 bp, Artificial Sequence
  BCR Reverse Primer
caagtagcccacaacagcaa

SEQ ID NO: 820 - DNA, 20 bp, Artificial Sequence
  BCR Reverse Primer
gagcgctggaaaataagacg

SEQ ID NO: 821 - DNA, 20 bp, Artificial Sequence
  BCR Reverse Primer
ctacaggaaggctgctttgg

SEQ ID NO: 822 - DNA, 20 bp, Artificial Sequence
  BCR Reverse Primer
caagacaccagctggcacta

SEQ ID NO: 823 - DNA, 20 bp, Artificial Sequence
  BCR Reverse Primer
ccggtatccttcctgtcctt

SEQ ID NO: 824 - DNA, 20 bp, Artificial Sequence
  BCR Reverse Primer
tgtctgagtatccccttggc

SEQ ID NO: 825 - DNA, 24 bp, Artificial Sequence
  BCR Reverse Primer
gctctttatagtttcacatgctca

SEQ ID NO: 826 - DNA, 20 bp, Artificial Sequence
  BCR Reverse Primer
actccatgctcactccatcc

SEQ ID NO: 827 - DNA, 20 bp, Artificial Sequence
  BCR Reverse Primer
caaggttctcacaaatgcca

SEQ ID NO: 828 - DNA, 20 bp, Artificial Sequence
  BCR Reverse Primer
cccttgcagaggtcagagag

SEQ ID NO: 829 - DNA, 20 bp, Artificial Sequence
  BCR Reverse Primer
tcaggccttactccactgct

SEQ ID NO: 830 - DNA, 20 bp, Artificial Sequence
  BCR Reverse Primer
gtccctcacattgccaagtt

SEQ ID NO: 831 - DNA, 20 bp, Artificial Sequence
  BCR Reverse Primer
ggaacgactctccacacctc

SEQ ID NO: 832 - DNA, 20 bp, Artificial Sequence
  BCR Reverse Primer
taccattggcaaagaaggga

SEQ ID NO: 833 - DNA, 20 bp, Artificial Sequence
  BCR Reverse Primer
gcacacgaagcacgaaataa

SEQ ID NO: 834 - DNA, 22 bp, Artificial Sequence
  BCR Reverse Primer
ccagaaagctgtgatcatggta

SEQ ID NO: 835 - DNA, 20 bp, Artificial Sequence
  BCR Reverse Primer
gacaacaagccaccaggttt

SEQ ID NO: 836 - DNA, 20 bp, Artificial Sequence
  BCR Reverse Primer
agcttcctccgaaacactca

SEQ ID NO: 837 - DNA, 20 bp, Artificial Sequence
  BCR Reverse Primer
gggtggaattactgcgtctg

SEQ ID NO: 838 - DNA, 20 bp, Artificial Sequence
  BCR Reverse Primer
ttgggcatctcactttttcc

SEQ ID NO: 839 - DNA, 20 bp, Artificial Sequence
  BCR Reverse Primer
caacagaatccggtggaagt

SEQ ID NO: 840 - DNA, 20 bp, Artificial Sequence
  BCR Reverse Primer
acaccccagcaatcttgaac

SEQ ID NO: 841 - DNA, 20 bp, Artificial Sequence
  BCR Reverse Primer
gacaattccatgttccccac

SEQ ID NO: 842 - DNA, 18 bp, Artificial Sequence
  BCR Reverse Primer
cacagctgcagatcaccg

SEQ ID NO: 843 - DNA, 20 bp, Artificial Sequence
  BCR Reverse Primer
agaacagtgaggggagggat

SEQ ID NO: 844 - DNA, 20 bp, Artificial Sequence
  BCR Reverse Primer
aggctgagcagggacaacta

SEQ ID NO: 845 - DNA, 20 bp, Artificial Sequence
  BCR Reverse Primer
ccctttacaggagtcccctc

SEQ ID NO: 846 - DNA, 20 bp, Artificial Sequence
  BCR Reverse Primer
agttggaagacacaccccac

SEQ ID NO: 847 - DNA, 20 bp, Artificial Sequence
  BCR Reverse Primer
gagatgcgtgaccttgacct

SEQ ID NO: 848 - DNA, 20 bp, Artificial Sequence
  BCR Reverse Primer
acaggttacatgcaggtcgg

SEQ ID NO: 849 - DNA, 20 bp, Artificial Sequence
  BCR Reverse Primer
ggagctctagagggaaccgt

SEQ ID NO: 850 - DNA, 20 bp, Artificial Sequence
  BCR Reverse Primer
aggaggtggcagacacagag

SEQ ID NO: 851 - DNA, 20 bp, Artificial Sequence
  BCR Reverse Primer
gctgcaaggagtgtgaatga

SEQ ID NO: 852 - DNA, 20 bp, Artificial Sequence
  BCR Reverse Primer
ctgccctaccatcaaagagg

SEQ ID NO: 853 - DNA, 20 bp, Artificial Sequence
  BCR Reverse Primer
tgcatgagcaggtcatcttc

SEQ ID NO: 854 - DNA, 20 bp, Artificial Sequence
  BCR Reverse Primer
gagaaataaggaccctgccc

SEQ ID NO: 855 - DNA, 20 bp, Artificial Sequence
  BCR Reverse Primer
ctgtgttccaccttcccact

SEQ ID NO: 856 - DNA, 20 bp, Artificial Sequence
  BCR Reverse Primer
tgggctcttgaactcagctt

SEQ ID NO: 857 - DNA, 20 bp, Artificial Sequence
  BCR Reverse Primer
cagcatccgcatctacaaga

SEQ ID NO: 858 - DNA, 20 bp, Artificial Sequence
  BCR Reverse Primer
gagactcacctggacccttg

SEQ ID NO: 859 - DNA, 20 bp, Artificial Sequence
  BCR Reverse Primer
tttcagcaccagcttccttt

SEQ ID NO: 860 - DNA, 20 bp, Artificial Sequence
  BCR Reverse Primer
gtcctccccctacagtccat

SEQ ID NO: 861 - DNA, 20 bp, Artificial Sequence
  BCR Reverse Primer
ctctcagcaggttttggagg

SEQ ID NO: 862 - DNA, 24 bp, Artificial Sequence
  BCR Reverse Primer
tcaaatactggactgttcctttca

SEQ ID NO: 863 - DNA, 20 bp, Artificial Sequence
  BCR Reverse Primer
gcagggtctaagaagcatgg

SEQ ID NO: 864 - DNA, 20 bp, Artificial Sequence
  BCR Reverse Primer
tttaccgtggactcctcagc

SEQ ID NO: 865 - DNA, 20 bp, Artificial Sequence
  BCR Reverse Primer
gcccaggagtttgtttgtgt

SEQ ID NO: 866 - DNA, 20 bp, Artificial Sequence
  BCR Reverse Primer
tcaatcattcggcttgtcag

SEQ ID NO: 867 - DNA, 20 bp, Artificial Sequence
  BCR Reverse Primer
tgcaattccagctaattccc

SEQ ID NO: 868 - DNA, 20 bp, Artificial Sequence
  BCR Reverse Primer
aaccagcaaagggtctgatg

SEQ ID NO: 869 - DNA, 20 bp, Artificial Sequence
  BCR Reverse Primer
tgaaataggccaatcccttg

SEQ ID NO: 870 - DNA, 20 bp, Artificial Sequence
  BCR Reverse Primer
gggggaactgccttctaatc

SEQ ID NO: 871 - DNA, 20 bp, Artificial Sequence
  BCR Reverse Primer
tctaaccaaaagcccaggaa

SEQ ID NO: 872 - DNA, 20 bp, Artificial Sequence
  BCR Reverse Primer
gggaacatcaccacacacag

SEQ ID NO: 873 - DNA, 20 bp, Artificial Sequence
  BCR Reverse Primer
caggcaatgtttgggatctt

SEQ ID NO: 874 - DNA, 20 bp, Artificial Sequence
  BCR Reverse Primer
ctgctaatcccaacacagca

SEQ ID NO: 875 - DNA, 20 bp, Artificial Sequence
  BCR Reverse Primer
gggtggggacataactcaca

SEQ ID NO: 876 - DNA, 20 bp, Artificial Sequence
  BCR Reverse Primer
ctagagcacttggggtcctg

SEQ ID NO: 877 - DNA, 20 bp, Artificial Sequence
  BCR Reverse Primer
tcaggtaaagggtggtgctc

SEQ ID NO: 878 - DNA, 20 bp, Artificial Sequence
  BCR Reverse Primer
ggcatttgcatttacccaac

SEQ ID NO: 879 - DNA, 20 bp, Artificial Sequence
  BCR Reverse Primer
caaacgagaacagcctgtca

SEQ ID NO: 880 - DNA, 19 bp, Artificial Sequence
  BCR Reverse Primer
gctcatcacatctgcaggg

SEQ ID NO: 881 - DNA, 20 bp, Artificial Sequence
  BCR Reverse Primer
agtgacagaggtcagggtgg

SEQ ID NO: 882 - DNA, 20 bp, Artificial Sequence
  BCR Reverse Primer
ttaacctgaccaccctcctg

SEQ ID NO: 883 - DNA, 19 bp, Artificial Sequence
  BCR Reverse Primer
aagactgtccagcacacgg

SEQ ID NO: 884 - DNA, 20 bp, Artificial Sequence
  BCR Reverse Primer
cagaacctggagaagaccca

SEQ ID NO: 885 - DNA, 20 bp, Artificial Sequence
  BCR Reverse Primer
tcagtcatagagtgcggcag

SEQ ID NO: 886 - DNA, 20 bp, Artificial Sequence
  BCR Reverse Primer
tggctagtaggtgtgcgttg

SEQ ID NO: 887 - DNA, 20 bp, Artificial Sequence
  BCR Reverse Primer
acagcttggctcaatcaggt

SEQ ID NO: 888 - DNA, 20 bp, Artificial Sequence
  BCR Reverse Primer
tgaggactgtggtatgctgc

SEQ ID NO: 889 - DNA, 20 bp, Artificial Sequence
  BCR Reverse Primer
agctttccttactcccctgg

SEQ ID NO: 890 - DNA, 20 bp, Artificial Sequence
  BCR Reverse Primer
gaggaaacggcactgagaag

SEQ ID NO: 891 - DNA, 20 bp, Artificial Sequence
  BCR Reverse Primer
tgtcaaaagcctgaggaaca

SEQ ID NO: 892 - DNA, 20 bp, Artificial Sequence
  BCR Reverse Primer
caacatgcagaaatggcaac

SEQ ID NO: 893 - DNA, 20 bp, Artificial Sequence
  BCR Reverse Primer
aatggcccagaggagagttt

SEQ ID NO: 894 - DNA, 20 bp, Artificial Sequence
  BCR Reverse Primer
gagaacagaccagagccacc

SEQ ID NO: 895 - DNA, 20 bp, Artificial Sequence
  BCR Reverse Primer
ttgtggagctcagacaccag

SEQ ID NO: 896 - DNA, 20 bp, Artificial Sequence
  BCR Reverse Primer
aatggcaggaagagggactt

SEQ ID NO: 897 - DNA, 20 bp, Artificial Sequence
  BCR Reverse Primer
ggcctggtgttggtagaaaa

SEQ ID NO: 898 - DNA, 20 bp, Artificial Sequence
  BCR Reverse Primer
ctggaagtggtctctgggaa

SEQ ID NO: 899 - DNA, 20 bp, Artificial Sequence
  BCR Reverse Primer
aggagggaggaagacagacc

SEQ ID NO: 900 - DNA, 20 bp, Artificial Sequence
  BCR Reverse Primer
cattcccggaggcaataata

SEQ ID NO: 901 - DNA, 20 bp, Artificial Sequence
  BCR Reverse Primer
gaaagtccaacccacacgac

SEQ ID NO: 902 - DNA, 20 bp, Artificial Sequence
  BCR Reverse Primer
caacaatgacatcaccaggc

SEQ ID NO: 903 - DNA, 20 bp, Artificial Sequence
  BCR Reverse Primer
tgagtgctttcggagatgtg

SEQ ID NO: 904 - DNA, 20 bp, Artificial Sequence
  BCR Reverse Primer
aaaacccaccaccctttacg

SEQ ID NO: 905 - DNA, 20 bp, Artificial Sequence
  BCR Reverse Primer
cacacgtcttttggagggat

SEQ ID NO: 906 - DNA, 20 bp, Artificial Sequence
  BCR Reverse Primer
tcaagagaagaaaggggcac

SEQ ID NO: 907 - DNA, 20 bp, Artificial Sequence
  BCR Reverse Primer
catgtgatgcctgggtacag

SEQ ID NO: 908 - DNA, 20 bp, Artificial Sequence
  BCR Reverse Primer
agagggagggcctagtgaaa

SEQ ID NO: 909 - DNA, 20 bp, Artificial Sequence
  BCR Reverse Primer
ccaggaatacccagtggaaa

SEQ ID NO: 910 - DNA, 20 bp, Artificial Sequence
  BCR Reverse Primer
cacgttccatatgagggctt

SEQ ID NO: 911 - DNA, 18 bp, Artificial Sequence
  BCR Reverse Primer
gagggtttgcctgcctgt

SEQ ID NO: 912 - DNA, 20 bp, Artificial Sequence
  BCR Reverse Primer
tgggtggagcaccttttatc

SEQ ID NO: 913 - DNA, 20 bp, Artificial Sequence
  BCR Reverse Primer
ccaccaagtccctcaacaag

SEQ ID NO: 914 - DNA, 20 bp, Artificial Sequence
  BCR Reverse Primer
acctgctgaatccgaagcta

SEQ ID NO: 915 - DNA, 20 bp, Artificial Sequence
  BCR Reverse Primer
ccaaaggttaccagcagagg

SEQ ID NO: 916 - DNA, 20 bp, Artificial Sequence
  BCR Reverse Primer
ccagaggcacctggagataa

SEQ ID NO: 917 - DNA, 20 bp, Artificial Sequence
  BCR Reverse Primer
gcaagttctgtccaccatga

SEQ ID NO: 918 - DNA, 20 bp, Artificial Sequence
  BCR Reverse Primer
gacagagaagggagcatcca

SEQ ID NO: 919 - DNA, 20 bp, Artificial Sequence
  BCR Reverse Primer
ggactcaccgctttagtgga

SEQ ID NO: 920 - DNA, 20 bp, Artificial Sequence
  BCR Reverse Primer
gcctctggtgctgacattct

SEQ ID NO: 921 - DNA, 20 bp, Artificial Sequence
  BCR Reverse Primer
gtccactgctttcttggagg

SEQ ID NO: 922 - DNA, 20 bp, Artificial Sequence
  BCR Reverse Primer
agctaagcagagtgcggaag

SEQ ID NO: 923 - DNA, 20 bp, Artificial Sequence
  BCR Reverse Primer
ggcccaagcaagttacttca

SEQ ID NO: 924 - DNA, 20 bp, Artificial Sequence
  BCR Reverse Primer
aactgcatcaaggactggct

SEQ ID NO: 925 - DNA, 20 bp, Artificial Sequence
  BCR Reverse Primer
ctcctccaatcaaatcccct

SEQ ID NO: 926 - DNA, 20 bp, Artificial Sequence
  BCR Reverse Primer
atttcccactggatggtcag

SEQ ID NO: 927 - DNA, 20 bp, Artificial Sequence
  BCR Reverse Primer
tagctagcacagctgctgga

SEQ ID NO: 928 - DNA, 20 bp, Artificial Sequence
  BCR Reverse Primer
tgccagttatgggaaaggac

SEQ ID NO: 929 - DNA, 20 bp, Artificial Sequence
  BCR Reverse Primer
cgttctgtccacatggtttg

SEQ ID NO: 930 - DNA, 19 bp, Artificial Sequence
  BCR Reverse Primer
ctccctgctccacaagagg

SEQ ID NO: 931 - DNA, 20 bp, Artificial Sequence
  BCR Reverse Primer
atcctagtgttggctgcgtt

SEQ ID NO: 932 - DNA, 19 bp, Artificial Sequence
  BCR Reverse Primer
cctgggagcagaatcacct

SEQ ID NO: 933 - DNA, 20 bp, Artificial Sequence
  BCR Reverse Primer
cgtccacttctccactggtt

SEQ ID NO: 934 - DNA, 20 bp, Artificial Sequence
  BCR Reverse Primer
caaaggcatgacaccaaaga

SEQ ID NO: 935 - DNA, 20 bp, Artificial Sequence
  BCR Reverse Primer
gcctcacctggattctctga

SEQ ID NO: 936 - DNA, 20 bp, Artificial Sequence
  BCR Reverse Primer
ggaccctccgcacatactaa

SEQ ID NO: 937 - DNA, 20 bp, Artificial Sequence
  BCR Reverse Primer
cttaagggcaaagaggctcc

SEQ ID NO: 938 - DNA, 20 bp, Artificial Sequence
  BCR Reverse Primer
gaagagggcacaagtgaggt

SEQ ID NO: 939 - DNA, 20 bp, Artificial Sequence
  BCR Reverse Primer
ggggcagcatgtatcaaaat

SEQ ID NO: 940 - DNA, 20 bp, Artificial Sequence
  BCR Reverse Primer
cgtcgttatggggaacaact

SEQ ID NO: 941 - DNA, 20 bp, Artificial Sequence
  BCR Reverse Primer
tagagctctttgccccattc

SEQ ID NO: 942 - DNA, 20 bp, Artificial Sequence
  BCR Reverse Primer
tgatcttaaaccgggtcctg

SEQ ID NO: 943 - DNA, 20 bp, Artificial Sequence
  BCR Reverse Primer
ctcacatcttccaggtggct

SEQ ID NO: 944 - DNA, 20 bp, Artificial Sequence
  BCR Reverse Primer
ccctctgaagctggtgttct

SEQ ID NO: 945 - DNA, 20 bp, Artificial Sequence
  BCR Reverse Primer
agggtagcagctggaagaca

SEQ ID NO: 946 - DNA, 20 bp, Artificial Sequence
  BCR Reverse Primer
cccactgtagctgactgcaa

SEQ ID NO: 947 - DNA, 20 bp, Artificial Sequence
  BCR Reverse Primer
ggtgctcaggtgtcatgcta

SEQ ID NO: 948 - DNA, 20 bp, Artificial Sequence
  BCR Reverse Primer
ggcagctgaagtttgaggtt

SEQ ID NO: 949 - DNA, 20 bp, Artificial Sequence
  BCR Reverse Primer
agctctgcagaaactccagg

SEQ ID NO: 950 - DNA, 20 bp, Artificial Sequence
  BCR Reverse Primer
agggtacaggtgggagtcag

SEQ ID NO: 951 - DNA, 20 bp, Artificial Sequence
  BCR Reverse Primer
gcctcaggactcttgtggag

SEQ ID NO: 952 - DNA, 18 bp, Artificial Sequence
  BCR Reverse Primer
atgcaggcagggagtcag

SEQ ID NO: 953 - DNA, 20 bp, Artificial Sequence
  BCR Reverse Primer
tccaaagaggaaaatgtcgc

SEQ ID NO: 954 - DNA, 20 bp, Artificial Sequence
  BCR Reverse Primer
gattgaatggtccagaggga

SEQ ID NO: 955 - DNA, 20 bp, Artificial Sequence
  BCR Reverse Primer
actccctgcatctcaaccat

SEQ ID NO: 956 - DNA, 20 bp, Artificial Sequence
  BCR Reverse Primer
gactgtcccaggagaagacg

SEQ ID NO: 957 - DNA, 20 bp, Artificial Sequence
  BCR Reverse Primer
gtgggagagccaaacaaaag

SEQ ID NO: 958 - DNA, 20 bp, Artificial Sequence
  BCR Reverse Primer
tccctgtgtgcctaaaatcc

SEQ ID NO: 959 - DNA, 20 bp, Artificial Sequence
  BCR Reverse Primer
acgtcactgttttcttgggg

SEQ ID NO: 960 - DNA, 20 bp, Artificial Sequence
  BCR Reverse Primer
ctacaacaaaccccaggtgc

SEQ ID NO: 961 - DNA, 20 bp, Artificial Sequence
  BCR Reverse Primer
cctgagctgttctttcctcg

SEQ ID NO: 962 - DNA, 20 bp, Artificial Sequence
  BCR Reverse Primer
tcacaagactcccacaacca

SEQ ID NO: 963 - DNA, 20 bp, Artificial Sequence
  BCR Reverse Primer
taccatcgatcccaggacat

SEQ ID NO: 964 - DNA, 20 bp, Artificial Sequence
  BCR Reverse Primer
gcacccaacaggaacacttt

SEQ ID NO: 965 - DNA, 20 bp, Artificial Sequence
  BCR Reverse Primer
acattgttgctgtgtgtgcc

SEQ ID NO: 966 - DNA, 20 bp, Artificial Sequence
  BCR Reverse Primer
agttctgtgagatgcggagg

SEQ ID NO: 967 - DNA, 20 bp, Artificial Sequence
  BCR Reverse Primer
gcaagactgtgggggataaa

SEQ ID NO: 968 - DNA, 20 bp, Artificial Sequence
  BCR Reverse Primer
gagtacatcagtgacggggg

SEQ ID NO: 969 - DNA, 20 bp, Artificial Sequence
  BCR Reverse Primer
ctacagtcaggttcacgccc

SEQ ID NO: 970 - DNA, 21 bp, Artificial Sequence
  BCR Reverse Primer
tggacactcagggtaccattc

SEQ ID NO: 971 - DNA, 20 bp, Artificial Sequence
  BCR Reverse Primer
tgctgcaaagacaaggaatg

SEQ ID NO: 972 - DNA, 20 bp, Artificial Sequence
  BCR Reverse Primer
tggaggcttaggagaagcaa

SEQ ID NO: 973 - DNA, 20 bp, Artificial Sequence
  BCR Reverse Primer
atgggtaagcgtggaagttg

SEQ ID NO: 974 - DNA, 20 bp, Artificial Sequence
  BCR Reverse Primer
aagggtgtccccaaatcagt

SEQ ID NO: 975 - DNA, 20 bp, Artificial Sequence
  BCR Reverse Primer
ccctggctgcaaattctaag

SEQ ID NO: 976 - DNA, 20 bp, Artificial Sequence
  BCR Reverse Primer
ctgcaggagaacctcgaaac

SEQ ID NO: 977 - DNA, 20 bp, Artificial Sequence
  BCR Reverse Primer
aggctaaggagggcattctc

SEQ ID NO: 978 - DNA, 20 bp, Artificial Sequence
  BCR Reverse Primer
gagcctcaccatctctcagc

SEQ ID NO: 979 - DNA, 20 bp, Artificial Sequence
  BCR Reverse Primer
ctcactccacagaaccctcc

SEQ ID NO: 980 - DNA, 20 bp, Artificial Sequence
  BCR Reverse Primer
ccctctcacctgctcttgac

SEQ ID NO: 981 - DNA, 20 bp, Artificial Sequence
  BCR Reverse Primer
aaccgactacgacatgctcc

SEQ ID NO: 982 - DNA, 18 bp, Artificial Sequence
  BCR Reverse Primer
gctggtgggagtgaggag

SEQ ID NO: 983 - DNA, 20 bp, Artificial Sequence
  BCR Reverse Primer
taaatgaaactgcgacctgc

SEQ ID NO: 984 - DNA, 20 bp, Artificial Sequence
  BCR Reverse Primer
acaccagttggaagaaacgc

SEQ ID NO: 985 - DNA, 20 bp, Artificial Sequence
  BCR Reverse Primer
tgtctccatgtttccaggtg

SEQ ID NO: 986 - DNA, 20 bp, Artificial Sequence
  BCR Reverse Primer
atcctgactgcatcccaaag

SEQ ID NO: 987 - DNA, 20 bp, Artificial Sequence
  BCR Reverse Primer
tttgatgctgccacagactc

SEQ ID NO: 988 - DNA, 20 bp, Artificial Sequence
  BCR Reverse Primer
gccttctccatacaaaggca

SEQ ID NO: 989 - DNA, 20 bp, Artificial Sequence
  BCR Reverse Primer
aaccaatgaattacgcaggg

SEQ ID NO: 990 - DNA, 20 bp, Artificial Sequence
  BCR Reverse Primer
aggggaggcacatacaacag

SEQ ID NO: 991 - DNA, 20 bp, Artificial Sequence
  BCR Reverse Primer
tcgcctgaattatttgaccc

SEQ ID NO: 992 - DNA, 20 bp, Artificial Sequence
  BCR Reverse Primer
tgcactctgaaaagtggcag

SEQ ID NO: 993 - DNA, 20 bp, Artificial Sequence
  BCR Reverse Primer
ctgaccctcacacccacttt

SEQ ID NO: 994 - DNA, 20 bp, Artificial Sequence
  BCR Reverse Primer
gctctgcttcttgagcttgg

SEQ ID NO: 995 - DNA, 20 bp, Artificial Sequence
  BCR Reverse Primer
tcctgaggtgacctttctgc

SEQ ID NO: 996 - DNA, 20 bp, Artificial Sequence
  BCR Reverse Primer
cctgacagatgggggaacta

SEQ ID NO: 997 - DNA, 18 bp, Artificial Sequence
  BCR Reverse Primer
atgaggccactggcaggt

SEQ ID NO: 998 - DNA, 20 bp, Artificial Sequence
  BCR Reverse Primer
actgcctccagttcatccac

SEQ ID NO: 999 - DNA, 20 bp, Artificial Sequence
  BCR Reverse Primer
catttagctgggggttctca

SEQ ID NO: 1000 - DNA, 20 bp, Artificial Sequence
  BCR Reverse Primer
ctgaacacctagaggggtgg

SEQ ID NO: 1001 - DNA, 20 bp, Artificial Sequence
  BCR Reverse Primer
tcacagtcccacaaggatga

SEQ ID NO: 1002 - DNA, 20 bp, Artificial Sequence
  BCR Reverse Primer
gtgacctacagggtccctca

SEQ ID NO: 1003 - DNA, 20 bp, Artificial Sequence
  BCR Reverse Primer
ccatctctccactcagcaca

SEQ ID NO: 1004 - DNA, 20 bp, Artificial Sequence
  BCR Reverse Primer
cagacaaaggaatgtgcgtg

SEQ ID NO: 1005 - DNA, 20 bp, Artificial Sequence
  BCR Reverse Primer
acgttgatccagacctgacc

SEQ ID NO: 1006 - DNA, 20 bp, Artificial Sequence
  BCR Reverse Primer
acacacccagttatctccgc

SEQ ID NO: 1007 - DNA, 20 bp, Artificial Sequence
  BCR Reverse Primer
gctgtcgccaacttcttttc

SEQ ID NO: 1008 - DNA, 20 bp, Artificial Sequence
  BCR Reverse Primer
cacagtgtgaatgcccaagt

SEQ ID NO: 1009 - DNA, 20 bp, Artificial Sequence
  BCR Reverse Primer
ggctggggctcctatgttat

SEQ ID NO: 1010 - DNA, 20 bp, Artificial Sequence
  BCR Reverse Primer
aggcctggaggagtcttagc

SEQ ID NO: 1011 - DNA, 20 bp, Artificial Sequence
  BCR Reverse Primer
aagtgctaacaggaaggggg

SEQ ID NO: 1012 - DNA, 20 bp, Artificial Sequence
  BCR Reverse Primer
acagcttgaccaaaagtgcc

SEQ ID NO: 1013 - DNA, 20 bp, Artificial Sequence
  BCR Reverse Primer
aggtaagccagtgtcatggg

SEQ ID NO: 1014 - DNA, 20 bp, Artificial Sequence
  BCR Reverse Primer
agccaaatctgctctgctgt

SEQ ID NO: 1015 - DNA, 20 bp, Artificial Sequence
  BCR Reverse Primer
attgctcacagacaggaccc

SEQ ID NO: 1016 - DNA, 20 bp, Artificial Sequence
  BCR Reverse Primer
ggagaatggcatttaacgga

SEQ ID NO: 1017 - DNA, 20 bp, Artificial Sequence
  BCR Reverse Primer
aagcccctacaatcagagca

SEQ ID NO: 1018 - DNA, 20 bp, Artificial Sequence
  BCR Reverse Primer
taattgtggtctggcgtgaa

SEQ ID NO: 1019 - DNA, 20 bp, Artificial Sequence
  BCR Reverse Primer
tgtgatgacagggatgggta

SEQ ID NO: 1020 - DNA, 20 bp, Artificial Sequence
  BCR Reverse Primer
gagaccttcgaggtcacagc

SEQ ID NO: 1021 - DNA, 20 bp, Artificial Sequence
  BCR Reverse Primer
gctccttgtgcccttgtact

SEQ ID NO: 1022 - DNA, 20 bp, Artificial Sequence
  BCR Reverse Primer
aaccctcatgtcttcatgcc

SEQ ID NO: 1023 - DNA, 20 bp, Artificial Sequence
  BCR Reverse Primer
tccttggggttgatacagga

SEQ ID NO: 1024 - DNA, 20 bp, Artificial Sequence
  BCR Reverse Primer
gccaatttcagcctaggaca

SEQ ID NO: 1025 - DNA, 20 bp, Artificial Sequence
  BCR Reverse Primer
agggcttcctctcagctacc

SEQ ID NO: 1026 - DNA, 20 bp, Artificial Sequence
  BCR Reverse Primer
tgagtcaatggttggcagaa

SEQ ID NO: 1027 - DNA, 20 bp, Artificial Sequence
  BCR Reverse Primer
tcgggtttttcttcgacact

SEQ ID NO: 1028 - DNA, 19 bp, Artificial Sequence
  BCR Reverse Primer
gctctcaagtccccaccac

SEQ ID NO: 1029 - DNA, 20 bp, Artificial Sequence
  BCR Reverse Primer
ggctcacaactcatgttcca

SEQ ID NO: 1030 - DNA, 20 bp, Artificial Sequence
  BCR Reverse Primer
gcaggggacattgaatctgt

SEQ ID NO: 1031 - DNA, 20 bp, Artificial Sequence
  BCR Reverse Primer
ttgaagtccttgtgtgtggg

SEQ ID NO: 1032 - DNA, 20 bp, Artificial Sequence
  BCR Reverse Primer
tgggtttaggaaccacttgc

SEQ ID NO: 1033 - DNA, 20 bp, Artificial Sequence
  BCR Reverse Primer
gaatctgggcttttcccagt

SEQ ID NO: 1034 - DNA, 20 bp, Artificial Sequence
  BCR Reverse Primer
tctgattgctgtgtgaaggg

SEQ ID NO: 1035 - DNA, 20 bp, Artificial Sequence
  BCR Reverse Primer
agggagggggctatgagtaa

SEQ ID NO: 1036 - DNA, 20 bp, Artificial Sequence
  BCR Reverse Primer
gatggtggcctagaggtctg

SEQ ID NO: 1037 - DNA, 20 bp, Artificial Sequence
  BCR Reverse Primer
ccttaagggaaaaaccgagg

SEQ ID NO: 1038 - DNA, 20 bp, Artificial Sequence
  BCR Reverse Primer
actgaagaccagggtgttgg

SEQ ID NO: 1039 - DNA, 20 bp, Artificial Sequence
  BCR Reverse Primer
gtgtgtgggaagaacaccct

SEQ ID NO: 1040 - DNA, 20 bp, Artificial Sequence
  BCR Reverse Primer
caggtgcttttcagcagagg

SEQ ID NO: 1041 - DNA, 20 bp, Artificial Sequence
  EGFR Forward Primer
attatccgacgctggctcta

SEQ ID NO: 1042 - DNA, 20 bp, Artificial Sequence
  EGFR Forward Primer
cgtcctttcctgtttccttg

SEQ ID NO: 1043 - DNA, 20 bp, Artificial Sequence
  EGFR Forward Primer
acccaaaaatacagcctccc

SEQ ID NO: 1044 - DNA, 20 bp, Artificial Sequence
  EGFR Forward Primer
cttgcctatccaagagtgcc

SEQ ID NO: 1045 - DNA, 20 bp, Artificial Sequence
  EGFR Forward Primer
tgaaggaactggtggaaagg

SEQ ID NO: 1046 - DNA, 22 bp, Artificial Sequence
  EGFR Forward Primer
cagaatgctcctgaagacaaga

SEQ ID NO: 1047 - DNA, 20 bp, Artificial Sequence
  EGFR Forward Primer
gactgccagacaccatttca

SEQ ID NO: 1048 - DNA, 20 bp, Artificial Sequence
  EGFR Forward Primer
ggtcaccttccatagaggca

SEQ ID NO: 1049 - DNA, 20 bp, Artificial Sequence
  EGFR Forward Primer
agatctaccccaccctccct

SEQ ID NO: 1050 - DNA, 20 bp, Artificial Sequence
  EGFR Forward Primer
tgcttccagattgctttcaa

SEQ ID NO: 1051 - DNA, 20 bp, Artificial Sequence
  EGFR Forward Primer
ggtccacgtgacagcactaa

SEQ ID NO: 1052 - DNA, 20 bp, Artificial Sequence
  EGFR Forward Primer
ggaatagggatgggtcacaa

SEQ ID NO: 1053 - DNA, 20 bp, Artificial Sequence
  EGFR Forward Primer
agctggccagtttgaatttg

SEQ ID NO: 1054 - DNA, 26 bp, Artificial Sequence
  EGFR Forward Primer
cccctagaaagtaagtgctagatttg

SEQ ID NO: 1055 - DNA, 20 bp, Artificial Sequence
  EGFR Forward Primer
cggagtccaagtgtcctttc

SEQ ID NO: 1056 - DNA, 20 bp, Artificial Sequence
  EGFR Forward Primer
ttcccaggacaaaggatgac

SEQ ID NO: 1057 - DNA, 20 bp, Artificial Sequence
  EGFR Forward Primer
ctccatcctcactgtggctt

SEQ ID NO: 1058 - DNA, 20 bp, Artificial Sequence
  EGFR Forward Primer
ctccacctgtctcatgctca

SEQ ID NO: 1059 - DNA, 20 bp, Artificial Sequence
  EGFR Forward Primer
tacgctagtggctgaaccaa

SEQ ID NO: 1060 - DNA, 20 bp, Artificial Sequence
  EGFR Forward Primer
caccctggcctctgagtaag

SEQ ID NO: 1061 - DNA, 20 bp, Artificial Sequence
  EGFR Forward Primer
cctctgtgacaaggggagtt

SEQ ID NO: 1062 - DNA, 20 bp, Artificial Sequence
  EGFR Forward Primer
aactttctccccaacagcaa

SEQ ID NO: 1063 - DNA, 22 bp, Artificial Sequence
  EGFR Forward Primer
ttcctttactccaggttttgga

SEQ ID NO: 1064 - DNA, 22 bp, Artificial Sequence
  EGFR Forward Primer
ccagcaatcattgaatacctga

SEQ ID NO: 1065 - DNA, 22 bp, Artificial Sequence
  EGFR Forward Primer
agccttcacagagaaagaaaaa

SEQ ID NO: 1066 - DNA, 20 bp, Artificial Sequence
  EGFR Forward Primer
tctcccctctcagtttcacc

SEQ ID NO: 1067 - DNA, 20 bp, Artificial Sequence
  EGFR Forward Primer
ctacaaccccacaggattgg

SEQ ID NO: 1068 - DNA, 22 bp, Artificial Sequence
  EGFR Forward Primer
tgtgttataactgcccattcca

SEQ ID NO: 1069 - DNA, 20 bp, Artificial Sequence
  EGFR Forward Primer
gccctccaagagtgttcatt

SEQ ID NO: 1070 - DNA, 20 bp, Artificial Sequence
  EGFR Forward Primer
actccagctgagcaatggat

SEQ ID NO: 1071 - DNA, 23 bp, Artificial Sequence
  EGFR Forward Primer
cagtcaacaaaaatctacctggc

SEQ ID NO: 1072 - DNA, 20 bp, Artificial Sequence
  EGFR Forward Primer
gattctttgggcaatggcta

SEQ ID NO: 1073 - DNA, 20 bp, Artificial Sequence
  EGFR Forward Primer
ggtagcatgaggtggtggtc

SEQ ID NO: 1074 - DNA, 20 bp, Artificial Sequence
  EGFR Forward Primer
aagccataaaaggcccagtt

SEQ ID NO: 1075 - DNA, 20 bp, Artificial Sequence
  EGFR Forward Primer
aaagagtttgctcccgtgaa

SEQ ID NO: 1076 - DNA, 20 bp, Artificial Sequence
  EGFR Forward Primer
cctggatggcatagagttga

SEQ ID NO: 1077 - DNA, 22 bp, Artificial Sequence
  EGFR Forward Primer
aaagcaaagtcttcaacaatgc

SEQ ID NO: 1078 - DNA, 20 bp, Artificial Sequence
  EGFR Forward Primer
aagcaaaatgtggacatggg

SEQ ID NO: 1079 - DNA, 20 bp, Artificial Sequence
  EGFR Forward Primer
cctgtgggtgtcagtttcct

SEQ ID NO: 1080 - DNA, 20 bp, Artificial Sequence
  EGFR Forward Primer
gtcctgggccagttttgata

SEQ ID NO: 1081 - DNA, 21 bp, Artificial Sequence
  EGFR Forward Primer
gccaggtgcccattattattt

SEQ ID NO: 1082 - DNA, 20 bp, Artificial Sequence
  EGFR Forward Primer
tgctggagacttgctgtttc

SEQ ID NO: 1083 - DNA, 23 bp, Artificial Sequence
  EGFR Forward Primer
cctttgtcctgtgtttaccttcc

SEQ ID NO: 1084 - DNA, 22 bp, Artificial Sequence
  EGFR Forward Primer
tgtgtggttaggaaggaagaaa

SEQ ID NO: 1085 - DNA, 20 bp, Artificial Sequence
  EGFR Forward Primer
acctaagccaaaagcccact

SEQ ID NO: 1086 - DNA, 20 bp, Artificial Sequence
  EGFR Forward Primer
gtttcaggtgttccgtgctc

SEQ ID NO: 1087 - DNA, 23 bp, Artificial Sequence
  EGFR Forward Primer
caaggcaatgcatctattctttc

SEQ ID NO: 1088 - DNA, 20 bp, Artificial Sequence
  EGFR Forward Primer
ttgggaataacacagctccc

SEQ ID NO: 1089 - DNA, 20 bp, Artificial Sequence
  EGFR Forward Primer
gtaccagcggggacagttta

SEQ ID NO: 1090 - DNA, 20 bp, Artificial Sequence
  EGFR Forward Primer
ggaatgggttcgctaaaatg

SEQ ID NO: 1091 - DNA, 21 bp, Artificial Sequence
  EGFR Forward Primer
cctgaccttcattgtcaaagc

SEQ ID NO: 1092 - DNA, 20 bp, Artificial Sequence
  EGFR Forward Primer
gaagggagataggaaagcgg

SEQ ID NO: 1093 - DNA, 20 bp, Artificial Sequence
  EGFR Forward Primer
tttggaggagtctcaccctg

SEQ ID NO: 1094 - DNA, 20 bp, Artificial Sequence
  EGFR Forward Primer
gacctgctccttcaatgctt

SEQ ID NO: 1095 - DNA, 20 bp, Artificial Sequence
  EGFR Forward Primer
aggtcccatatcccaaaagg

SEQ ID NO: 1096 - DNA, 20 bp, Artificial Sequence
  EGFR Forward Primer
cctctgtgccgatacctttc

SEQ ID NO: 1097 - DNA, 20 bp, Artificial Sequence
  EGFR Forward Primer
gctctgtggaggtcagaagg

SEQ ID NO: 1098 - DNA, 23 bp, Artificial Sequence
  EGFR Forward Primer
aattctttccattagcaaggagc

SEQ ID NO: 1099 - DNA, 20 bp, Artificial Sequence
  EGFR Forward Primer
acaacatgcctttttcccag

SEQ ID NO: 1100 - DNA, 21 bp, Artificial Sequence
  EGFR Forward Primer
ccatgtacagagtggacacca

SEQ ID NO: 1101 - DNA, 20 bp, Artificial Sequence
  EGFR Forward Primer
acaggtgagcgtgacaagtg

SEQ ID NO: 1102 - DNA, 22 bp, Artificial Sequence
  EGFR Forward Primer
ctggtaacctcaagaaacacca

SEQ ID NO: 1103 - DNA, 20 bp, Artificial Sequence
  EGFR Forward Primer
ggttctgtgacccacatcct

SEQ ID NO: 1104 - DNA, 21 bp, Artificial Sequence
  EGFR Forward Primer
tctgtgaatttcctttcgctg

SEQ ID NO: 1105 - DNA, 20 bp, Artificial Sequence
  EGFR Forward Primer
cccaaggttaagccaagtca

SEQ ID NO: 1106 - DNA, 20 bp, Artificial Sequence
  EGFR Forward Primer
tcagaaaggaatcagtgggg

SEQ ID NO: 1107 - DNA, 20 bp, Artificial Sequence
  EGFR Forward Primer
gcctgtttctgctttatggg

SEQ ID NO: 1108 - DNA, 20 bp, Artificial Sequence
  EGFR Forward Primer
ataagcgggcatacaacagg

SEQ ID NO: 1109 - DNA, 20 bp, Artificial Sequence
  EGFR Forward Primer
acaaaacctgcatcacctcc

SEQ ID NO: 1110 - DNA, 23 bp, Artificial Sequence
  EGFR Forward Primer
ttcacttgcttttctatgacagg

SEQ ID NO: 1111 - DNA, 20 bp, Artificial Sequence
  EGFR Forward Primer
cctcacctgtcgagtgtcaa

SEQ ID NO: 1112 - DNA, 20 bp, Artificial Sequence
  EGFR Forward Primer
ggctgtgtttctctgaaggc

SEQ ID NO: 1113 - DNA, 20 bp, Artificial Sequence
  EGFR Forward Primer
tataaagggcagcatttggc

SEQ ID NO: 1114 - DNA, 20 bp, Artificial Sequence
  EGFR Forward Primer
tcttggtgtgtccggtgata

SEQ ID NO: 1115 - DNA, 20 bp, Artificial Sequence
  EGFR Forward Primer
tgccttgagtggtggttaca

SEQ ID NO: 1116 - DNA, 20 bp, Artificial Sequence
  EGFR Forward Primer
gtgtacaggctcccagcatt

SEQ ID NO: 1117 - DNA, 20 bp, Artificial Sequence
  EGFR Forward Primer
tgccaggaacattgaatgag

SEQ ID NO: 1118 - DNA, 21 bp, Artificial Sequence
  EGFR Forward Primer
gcccaactagctcagttctca

SEQ ID NO: 1119 - DNA, 20 bp, Artificial Sequence
  EGFR Forward Primer
cagaaagctctaccgcctgt

SEQ ID NO: 1120 - DNA, 20 bp, Artificial Sequence
  EGFR Forward Primer
tcttctctcctcctcctccc

SEQ ID NO: 1121 - DNA, 20 bp, Artificial Sequence
  EGFR Forward Primer
ctcccctgtaggtctctccc

SEQ ID NO: 1122 - DNA, 20 bp, Artificial Sequence
  EGFR Forward Primer
tcactcctcactgttcctgc

SEQ ID NO: 1123 - DNA, 20 bp, Artificial Sequence
  EGFR Forward Primer
cagacgctgaccactgctta

SEQ ID NO: 1124 - DNA, 20 bp, Artificial Sequence
  EGFR Forward Primer
ccagcctcacagcctcttac

SEQ ID NO: 1125 - DNA, 20 bp, Artificial Sequence
  EGFR Forward Primer
gcatccacagcattgtttgt

SEQ ID NO: 1126 - DNA, 20 bp, Artificial Sequence
  EGFR Forward Primer
gcagccaggtagagaaatgc

SEQ ID NO: 1127 - DNA, 20 bp, Artificial Sequence
  EGFR Forward Primer
cggaaaatagcacccttcaa

SEQ ID NO: 1128 - DNA, 20 bp, Artificial Sequence
  EGFR Forward Primer
cctgtggcaacttgtgaaga

SEQ ID NO: 1129 - DNA, 20 bp, Artificial Sequence
  EGFR Forward Primer
cacaaagtgaaggctggtga

SEQ ID NO: 1130 - DNA, 20 bp, Artificial Sequence
  EGFR Forward Primer
acaaacccgattgtcaggag

SEQ ID NO: 1131 - DNA, 20 bp, Artificial Sequence
  EGFR Forward Primer
cacctccaagtcactctccc

SEQ ID NO: 1132 - DNA, 20 bp, Artificial Sequence
  EGFR Forward Primer
cagttgctccagacaggtca

SEQ ID NO: 1133 - DNA, 20 bp, Artificial Sequence
  EGFR Forward Primer
tgctctttcccatgtttgtg

SEQ ID NO: 1134 - DNA, 20 bp, Artificial Sequence
  EGFR Forward Primer
ggtttccctgacttcatcca

SEQ ID NO: 1135 - DNA, 20 bp, Artificial Sequence
  EGFR Forward Primer
ttcagtgcacccattttcaa

SEQ ID NO: 1136 - DNA, 20 bp, Artificial Sequence
  EGFR Forward Primer
cctgcttgaggtcagttcct

SEQ ID NO: 1137 - DNA, 20 bp, Artificial Sequence
  EGFR Forward Primer
aaggtgaacatccttggctc

SEQ ID NO: 1138 - DNA, 20 bp, Artificial Sequence
  EGFR Forward Primer
tcaggaaagcaggtagccaa

SEQ ID NO: 1139 - DNA, 20 bp, Artificial Sequence
  EGFR Forward Primer
ggctttgccctttaaccact

SEQ ID NO: 1140 - DNA, 20 bp, Artificial Sequence
  EGFR Forward Primer
atccaaattccacatgagcc

SEQ ID NO: 1141 - DNA, 20 bp, Artificial Sequence
  EGFR Forward Primer
aagcttacagggaggccaat

SEQ ID NO: 1142 - DNA, 20 bp, Artificial Sequence
  EGFR Forward Primer
ggtctgcagcttggatttct

SEQ ID NO: 1143 - DNA, 20 bp, Artificial Sequence
  EGFR Forward Primer
aatgggattgagaggggaat

SEQ ID NO: 1144 - DNA, 20 bp, Artificial Sequence
  EGFR Forward Primer
cacctgctcactcctccttc

SEQ ID NO: 1145 - DNA, 20 bp, Artificial Sequence
  EGFR Forward Primer
cggaagaactgaaggcagag

SEQ ID NO: 1146 - DNA, 20 bp, Artificial Sequence
  EGFR Forward Primer
aaatcgctggattcttgtgg

SEQ ID NO: 1147 - DNA, 20 bp, Artificial Sequence
  EGFR Forward Primer
taacgatgcagttccctgtg

SEQ ID NO: 1148 - DNA, 20 bp, Artificial Sequence
  EGFR Forward Primer
atgccccagtgggaactact

SEQ ID NO: 1149 - DNA, 20 bp, Artificial Sequence
  EGFR Forward Primer
cactgttgtcagctgcttcc

SEQ ID NO: 1150 - DNA, 20 bp, Artificial Sequence
  EGFR Forward Primer
gctaagtgggcagcattgtt

SEQ ID NO: 1151 - DNA, 20 bp, Artificial Sequence
  EGFR Forward Primer
ggctagaaagatggggaagg

SEQ ID NO: 1152 - DNA, 20 bp, Artificial Sequence
  EGFR Forward Primer
cacgtgagcactgaaaaggt

SEQ ID NO: 1153 - DNA, 20 bp, Artificial Sequence
  EGFR Forward Primer
gaaacggacttgtggcatct

SEQ ID NO: 1154 - DNA, 20 bp, Artificial Sequence
  EGFR Forward Primer
gaagaaatatgtgcccggaa

SEQ ID NO: 1155 - DNA, 20 bp, Artificial Sequence
  EGFR Forward Primer
catcagcacacgcagttttt

SEQ ID NO: 1156 - DNA, 20 bp, Artificial Sequence
  EGFR Forward Primer
ccagctgctcacttctgaaa

SEQ ID NO: 1157 - DNA, 26 bp, Artificial Sequence
  EGFR Forward Primer
aaacctaagagaacctctatttttga

SEQ ID NO: 1158 - DNA, 20 bp, Artificial Sequence
  EGFR Forward Primer
gcttcaccattcacacatgg

SEQ ID NO: 1159 - DNA, 20 bp, Artificial Sequence
  EGFR Forward Primer
ggattatgacagccccaaga

SEQ ID NO: 1160 - DNA, 20 bp, Artificial Sequence
  EGFR Forward Primer
ctggaagaggtctgccactc

SEQ ID NO: 1161 - DNA, 20 bp, Artificial Sequence
  EGFR Forward Primer
actggagattcctgctgcat

SEQ ID NO: 1162 - DNA, 20 bp, Artificial Sequence
  EGFR Forward Primer
ctgacagccagtttcccatt

SEQ ID NO: 1163 - DNA, 20 bp, Artificial Sequence
  EGFR Forward Primer
tctctacggctgcattcctt

SEQ ID NO: 1164 - DNA, 21 bp, Artificial Sequence
  EGFR Forward Primer
ggtgttctggcagttgacatt

SEQ ID NO: 1165 - DNA, 20 bp, Artificial Sequence
  EGFR Forward Primer
tctttcgcacatcacagagg

SEQ ID NO: 1166 - DNA, 20 bp, Artificial Sequence
  EGFR Forward Primer
accatgcatccacagagaca

SEQ ID NO: 1167 - DNA, 20 bp, Artificial Sequence
  EGFR Forward Primer
acagctgcaggagcaaaagt

SEQ ID NO: 1168 - DNA, 21 bp, Artificial Sequence
  EGFR Forward Primer
gaacagttgttttggtttggc

SEQ ID NO: 1169 - DNA, 20 bp, Artificial Sequence
  EGFR Forward Primer
agattgcttgtgtctgcgtg

SEQ ID NO: 1170 - DNA, 20 bp, Artificial Sequence
  EGFR Forward Primer
tcacaggaaaagccctcatc

SEQ ID NO: 1171 - DNA, 21 bp, Artificial Sequence
  EGFR Forward Primer
caaagcagtttgaggctttga

SEQ ID NO: 1172 - DNA, 20 bp, Artificial Sequence
  EGFR Forward Primer
cagaaagacagtgggcacaa

SEQ ID NO: 1173 - DNA, 27 bp, Artificial Sequence
  EGFR Forward Primer
catgtacaaaactgagaaattacctga

SEQ ID NO: 1174 - DNA, 20 bp, Artificial Sequence
  EGFR Forward Primer
cttgcttttcagggcacaat

SEQ ID NO: 1175 - DNA, 20 bp, Artificial Sequence
  EGFR Forward Primer
tggaagaggactttgccatc

SEQ ID NO: 1176 - DNA, 20 bp, Artificial Sequence
  EGFR Forward Primer
gtatacacatcccaccggct

SEQ ID NO: 1177 - DNA, 20 bp, Artificial Sequence
  EGFR Forward Primer
cgtgaagactttaggggcaa

SEQ ID NO: 1178 - DNA, 19 bp, Artificial Sequence
  EGFR Forward Primer
gtaggcacacgcacagctc

SEQ ID NO: 1179 - DNA, 20 bp, Artificial Sequence
  EGFR Forward Primer
caccaacagaagacagccaa

SEQ ID NO: 1180 - DNA, 22 bp, Artificial Sequence
  EGFR Forward Primer
ctgcctactcaaggtggatttt

SEQ ID NO: 1181 - DNA, 20 bp, Artificial Sequence
  EGFR Forward Primer
tggtgcatgtgaagtgtcaa

SEQ ID NO: 1182 - DNA, 20 bp, Artificial Sequence
  EGFR Forward Primer
gccttctttcctgtgtgctt

SEQ ID NO: 1183 - DNA, 20 bp, Artificial Sequence
  EGFR Forward Primer
agggcagttggatattgcag

SEQ ID NO: 1184 - DNA, 20 bp, Artificial Sequence
  EGFR Forward Primer
ggcccatagggaaatgaagt

SEQ ID NO: 1185 - DNA, 20 bp, Artificial Sequence
  EGFR Forward Primer
aaaacagaaaaccagcgtgc

SEQ ID NO: 1186 - DNA, 20 bp, Artificial Sequence
  EGFR Forward Primer
ggttcgaccatgagtcctgt

SEQ ID NO: 1187 - DNA, 20 bp, Artificial Sequence
  EGFR Forward Primer
atatcgtcttgcttgctccc

SEQ ID NO: 1188 - DNA, 22 bp, Artificial Sequence
  EGFR Forward Primer
tcatccagaatttgaaccttga

SEQ ID NO: 1189 - DNA, 20 bp, Artificial Sequence
  EGFR Forward Primer
acctaggacagtttgggcct

SEQ ID NO: 1190 - DNA, 20 bp, Artificial Sequence
  EGFR Forward Primer
cctcagaggccatcacaagt

SEQ ID NO: 1191 - DNA, 20 bp, Artificial Sequence
  EGFR Forward Primer
ctggaaatgtccaagcctgt

SEQ ID NO: 1192 - DNA, 20 bp, Artificial Sequence
  EGFR Forward Primer
caagactcaagggcaccagt

SEQ ID NO: 1193 - DNA, 20 bp, Artificial Sequence
  EGFR Forward Primer
caccccttcgcctattatca

SEQ ID NO: 1194 - DNA, 20 bp, Artificial Sequence
  EGFR Forward Primer
ctaagccatcctctgcttgg

SEQ ID NO: 1195 - DNA, 20 bp, Artificial Sequence
  EGFR Forward Primer
gcctcaagcacacagaaaaa

SEQ ID NO: 1196 - DNA, 20 bp, Artificial Sequence
  EGFR Forward Primer
gtgtgttgtgtgcccttttg

SEQ ID NO: 1197 - DNA, 20 bp, Artificial Sequence
  EGFR Forward Primer
gagacgctatctgcagggac

SEQ ID NO: 1198 - DNA, 19 bp, Artificial Sequence
  EGFR Forward Primer
gatgaggaccaccctgtcc

SEQ ID NO: 1199 - DNA, 20 bp, Artificial Sequence
  EGFR Forward Primer
tatgtgcgtcctcctccttc

SEQ ID NO: 1200 - DNA, 20 bp, Artificial Sequence
  EGFR Forward Primer
cagagaggggacatcctgag

SEQ ID NO: 1201 - DNA, 20 bp, Artificial Sequence
  EGFR Forward Primer
gagatggggaaggaaaggtc

SEQ ID NO: 1202 - DNA, 20 bp, Artificial Sequence
  EGFR Forward Primer
gcatggattttatggcgttt

SEQ ID NO: 1203 - DNA, 20 bp, Artificial Sequence
  EGFR Forward Primer
tagaaatgccctgcaaaagg

SEQ ID NO: 1204 - DNA, 20 bp, Artificial Sequence
  EGFR Forward Primer
gcggcagaaggaactgtatt

SEQ ID NO: 1205 - DNA, 20 bp, Artificial Sequence
  EGFR Forward Primer
aagtgtggtgtctgtgagcg

SEQ ID NO: 1206 - DNA, 20 bp, Artificial Sequence
  EGFR Forward Primer
cacaaaaagcagcacaggaa

SEQ ID NO: 1207 - DNA, 20 bp, Artificial Sequence
  EGFR Forward Primer
ctagggccttcctctcactg

SEQ ID NO: 1208 - DNA, 20 bp, Artificial Sequence
  EGFR Forward Primer
tttcctttcctcccctctgt

SEQ ID NO: 1209 - DNA, 21 bp, Artificial Sequence
  EGFR Forward Primer
ttacccagggttttcattttt

SEQ ID NO: 1210 - DNA, 20 bp, Artificial Sequence
  EGFR Forward Primer
ttaaccatggcaatgtcacc

SEQ ID NO: 1211 - DNA, 21 bp, Artificial Sequence
  EGFR Forward Primer
tgctgaatgtcatctttggtg

SEQ ID NO: 1212 - DNA, 20 bp, Artificial Sequence
  EGFR Forward Primer
aacatcctgggaatgattgg

SEQ ID NO: 1213 - DNA, 20 bp, Artificial Sequence
  EGFR Forward Primer
tcaggcccactcaggataac

SEQ ID NO: 1214 - DNA, 20 bp, Artificial Sequence
  EGFR Forward Primer
tagccattcattccagcctc

SEQ ID NO: 1215 - DNA, 21 bp, Artificial Sequence
  EGFR Forward Primer
gcctacaggacaacagtcagc

SEQ ID NO: 1216 - DNA, 20 bp, Artificial Sequence
  EGFR Forward Primer
ttccgttgtccatgagatga

SEQ ID NO: 1217 - DNA, 20 bp, Artificial Sequence
  EGFR Forward Primer
acgaaaattgcgaaggatca

SEQ ID NO: 1218 - DNA, 20 bp, Artificial Sequence
  EGFR Forward Primer
tactggaacattccctccca

SEQ ID NO: 1219 - DNA, 20 bp, Artificial Sequence
  EGFR Forward Primer
gctccctttccctttgaaga

SEQ ID NO: 1220 - DNA, 20 bp, Artificial Sequence
  EGFR Forward Primer
gaagtgtggggtttgacgac

SEQ ID NO: 1221 - DNA, 20 bp, Artificial Sequence
  EGFR Forward Primer
actgagaacacaaggctggc

SEQ ID NO: 1222 - DNA, 20 bp, Artificial Sequence
  EGFR Forward Primer
cagaaacattctatccggca

SEQ ID NO: 1223 - DNA, 20 bp, Artificial Sequence
  EGFR Forward Primer
gaaacttcccgattgggttt

SEQ ID NO: 1224 - DNA, 20 bp, Artificial Sequence
  EGFR Forward Primer
ctcccaggagtgtgagaagc

SEQ ID NO: 1225 - DNA, 20 bp, Artificial Sequence
  EGFR Forward Primer
tttggtaaagccctggtcac

SEQ ID NO: 1226 - DNA, 20 bp, Artificial Sequence
  EGFR Forward Primer
gtcctgtccctttgacgatg

SEQ ID NO: 1227 - DNA, 23 bp, Artificial Sequence
  EGFR Forward Primer
ggtcgatcatttaggttttgttt

SEQ ID NO: 1228 - DNA, 20 bp, Artificial Sequence
  EGFR Forward Primer
acgtacttctctgtgcacgc

SEQ ID NO: 1229 - DNA, 20 bp, Artificial Sequence
  EGFR Forward Primer
acccaacaaccagcctactg

SEQ ID NO: 1230 - DNA, 20 bp, Artificial Sequence
  EGFR Forward Primer
tcaggagctgtacgtgcatt

SEQ ID NO: 1231 - DNA, 23 bp, Artificial Sequence
  EGFR Forward Primer
tgtgtagattttcttgacttggc

SEQ ID NO: 1232 - DNA, 20 bp, Artificial Sequence
  EGFR Forward Primer
tctgatgttgatggacccaa

SEQ ID NO: 1233 - DNA, 20 bp, Artificial Sequence
  EGFR Forward Primer
aaatgggccttttgaatgaa

SEQ ID NO: 1234 - DNA, 20 bp, Artificial Sequence
  EGFR Forward Primer
tcccttcgacagtacaggct

SEQ ID NO: 1235 - DNA, 20 bp, Artificial Sequence
  EGFR Forward Primer
tgtttaatgcgggctacctc

SEQ ID NO: 1236 - DNA, 20 bp, Artificial Sequence
  EGFR Forward Primer
gggcacttgcaatcaaaact

SEQ ID NO: 1237 - DNA, 20 bp, Artificial Sequence
  EGFR Forward Primer
accgtatctccagcaattcg

SEQ ID NO: 1238 - DNA, 20 bp, Artificial Sequence
  EGFR Forward Primer
gaggctttgaaaactcagcc

SEQ ID NO: 1239 - DNA, 20 bp, Artificial Sequence
  EGFR Forward Primer
tgtgttgggaattgtgctgt

SEQ ID NO: 1240 - DNA, 21 bp, Artificial Sequence
  EGFR Forward Primer
ttcccttgtcctttcctatca

SEQ ID NO: 1241 - DNA, 20 bp, Artificial Sequence
  EGFR Forward Primer
tccatacatttctctcgggc

SEQ ID NO: 1242 - DNA, 20 bp, Artificial Sequence
  EGFR Forward Primer
aatgaattggcttcacccag

SEQ ID NO: 1243 - DNA, 20 bp, Artificial Sequence
  EGFR Forward Primer
cagacgttttcaagggccta

SEQ ID NO: 1244 - DNA, 23 bp, Artificial Sequence
  EGFR Forward Primer
gatccactttgagagaagtaggg

SEQ ID NO: 1245 - DNA, 20 bp, Artificial Sequence
  EGFR Forward Primer
ataggtgctgaacccaggtg

SEQ ID NO: 1246 - DNA, 20 bp, Artificial Sequence
  EGFR Forward Primer
atttgccttctcacaggcag

SEQ ID NO: 1247 - DNA, 20 bp, Artificial Sequence
  EGFR Forward Primer
gcacacacgtgcagataagg

SEQ ID NO: 1248 - DNA, 20 bp, Artificial Sequence
  EGFR Forward Primer
attctccggttgtgttcacc

SEQ ID NO: 1249 - DNA, 20 bp, Artificial Sequence
  EGFR Forward Primer
tgaagtggacacgtgttggt

SEQ ID NO: 1250 - DNA, 20 bp, Artificial Sequence
  EGFR Forward Primer
agcccaagtcactggctcta

SEQ ID NO: 1251 - DNA, 20 bp, Artificial Sequence
  EGFR Forward Primer
cagatctacaggggaaggga

SEQ ID NO: 1252 - DNA, 20 bp, Artificial Sequence
  EGFR Forward Primer
cctgggagtcctaacagtgc

SEQ ID NO: 1253 - DNA, 20 bp, Artificial Sequence
  EGFR Forward Primer
gccccatgctcttctgtact

SEQ ID NO: 1254 - DNA, 20 bp, Artificial Sequence
  EGFR Forward Primer
ccttagcctccatctggttg

SEQ ID NO: 1255 - DNA, 20 bp, Artificial Sequence
  EGFR Forward Primer
ccacagtcaggaactgctca

SEQ ID NO: 1256 - DNA, 21 bp, Artificial Sequence
  EGFR Forward Primer
aagaacaagttactccggcaa

SEQ ID NO: 1257 - DNA, 20 bp, Artificial Sequence
  EGFR Forward Primer
ctgactccccgagtcttctg

SEQ ID NO: 1258 - DNA, 20 bp, Artificial Sequence
  EGFR Forward Primer
ggtggtggctttctctgtgt

SEQ ID NO: 1259 - DNA, 20 bp, Artificial Sequence
  EGFR Forward Primer
gctgtcagcattggaaatca

SEQ ID NO: 1260 - DNA, 20 bp, Artificial Sequence
  EGFR Forward Primer
cacccccttctaggatctga

SEQ ID NO: 1261 - DNA, 20 bp, Artificial Sequence
  EGFR Forward Primer
gggctgcatcttatggtttc

SEQ ID NO: 1262 - DNA, 20 bp, Artificial Sequence
  EGFR Forward Primer
ggttcttgccagatcctcag

SEQ ID NO: 1263 - DNA, 20 bp, Artificial Sequence
  EGFR Forward Primer
gcctcacgtcacacatcact

SEQ ID NO: 1264 - DNA, 20 bp, Artificial Sequence
  EGFR Forward Primer
ccctctgacaactctgctcc

SEQ ID NO: 1265 - DNA, 20 bp, Artificial Sequence
  EGFR Forward Primer
atgccatcggtacagacaca

SEQ ID NO: 1266 - DNA, 20 bp, Artificial Sequence
  EGFR Forward Primer
tagccacacatgacctgcat

SEQ ID NO: 1267 - DNA, 20 bp, Artificial Sequence
  EGFR Forward Primer
agaggttgtgctatgtcggg

SEQ ID NO: 1268 - DNA, 20 bp, Artificial Sequence
  EGFR Forward Primer
actcccacctgtaagacccc

SEQ ID NO: 1269 - DNA, 20 bp, Artificial Sequence
  EGFR Forward Primer
tggttttcccctgatgtttg

SEQ ID NO: 1270 - DNA, 20 bp, Artificial Sequence
  EGFR Forward Primer
agtttggggagtttgggaag

SEQ ID NO: 1271 - DNA, 20 bp, Artificial Sequence
  EGFR Forward Primer
tacatggaaagggatttggg

SEQ ID NO: 1272 - DNA, 20 bp, Artificial Sequence
  EGFR Forward Primer
acattgggccacattctttc

SEQ ID NO: 1273 - DNA, 24 bp, Artificial Sequence
  EGFR Forward Primer
gactgaaactgttctgaaatgaca

SEQ ID NO: 1274 - DNA, 20 bp, Artificial Sequence
  EGFR Forward Primer
taggcactatcccgagtgct

SEQ ID NO: 1275 - DNA, 20 bp, Artificial Sequence
  EGFR Forward Primer
agagcctatctgtgggggtt

SEQ ID NO: 1276 - DNA, 20 bp, Artificial Sequence
  EGFR Forward Primer
aactgaagggggaaatctgg

SEQ ID NO: 1277 - DNA, 20 bp, Artificial Sequence
  EGFR Forward Primer
tttagccatctcccctgatg

SEQ ID NO: 1278 - DNA, 20 bp, Artificial Sequence
  EGFR Forward Primer
tggttttctgttgttggcag

SEQ ID NO: 1279 - DNA, 20 bp, Artificial Sequence
  EGFR Forward Primer
ttgacaacatccagggtgaa

SEQ ID NO: 1280 - DNA, 20 bp, Artificial Sequence
  EGFR Forward Primer
tgagaagggctgacacacat

SEQ ID NO: 1281 - DNA, 20 bp, Artificial Sequence
  EGFR Forward Primer
cctggagtggatttggatgt

SEQ ID NO: 1282 - DNA, 20 bp, Artificial Sequence
  EGFR Forward Primer
cacaggcctgaaggaaatgt

SEQ ID NO: 1283 - DNA, 26 bp, Artificial Sequence
  EGFR Forward Primer
gatcctggtaaaaatctatcaagtca

SEQ ID NO: 1284 - DNA, 20 bp, Artificial Sequence
  EGFR Forward Primer
aagcagcagcatattttggc

SEQ ID NO: 1285 - DNA, 20 bp, Artificial Sequence
  EGFR Forward Primer
tgcccattgggttttgttat

SEQ ID NO: 1286 - DNA, 20 bp, Artificial Sequence
  EGFR Forward Primer
tctgcattatcttccccctg

SEQ ID NO: 1287 - DNA, 20 bp, Artificial Sequence
  EGFR Forward Primer
tgcaagagcctagaaaagcc

SEQ ID NO: 1288 - DNA, 20 bp, Artificial Sequence
  EGFR Forward Primer
tgttgtcgaatgtgtgggtt

SEQ ID NO: 1289 - DNA, 20 bp, Artificial Sequence
  EGFR Forward Primer
tgacaggagagatggggaag

SEQ ID NO: 1290 - DNA, 22 bp, Artificial Sequence
  EGFR Forward Primer
ggagtgatttgaactccacaaa

SEQ ID NO: 1291 - DNA, 20 bp, Artificial Sequence
  EGFR Forward Primer
tgagcagcacagtcccatag

SEQ ID NO: 1292 - DNA, 20 bp, Artificial Sequence
  EGFR Forward Primer
tacagcaatggaagaatcgg

SEQ ID NO: 1293 - DNA, 20 bp, Artificial Sequence
  EGFR Forward Primer
attcaaagccttcctcgctt

SEQ ID NO: 1294 - DNA, 21 bp, Artificial Sequence
  EGFR Forward Primer
tggacttcagaacaagaggga

SEQ ID NO: 1295 - DNA, 22 bp, Artificial Sequence
  EGFR Forward Primer
ccagagacaacaagttttgagc

SEQ ID NO: 1296 - DNA, 20 bp, Artificial Sequence
  EGFR Forward Primer
aattttcgttggcactgacc

SEQ ID NO: 1297 - DNA, 20 bp, Artificial Sequence
  EGFR Forward Primer
ctcctttctcttgccattcg

SEQ ID NO: 1298 - DNA, 20 bp, Artificial Sequence
  EGFR Forward Primer
aattggatttggaatcgctg

SEQ ID NO: 1299 - DNA, 20 bp, Artificial Sequence
  EGFR Forward Primer
gacaggcttgaagcagaacc

SEQ ID NO: 1300 - DNA, 20 bp, Artificial Sequence
  EGFR Forward Primer
acccacctgaggagtgtttg

SEQ ID NO: 1301 - DNA, 20 bp, Artificial Sequence
  EGFR Forward Primer
cagagctgggactggaactc

SEQ ID NO: 1302 - DNA, 20 bp, Artificial Sequence
  EGFR Forward Primer
tttgatgagtgctgtggctc

SEQ ID NO: 1303 - DNA, 20 bp, Artificial Sequence
  EGFR Forward Primer
gcctagacatggcctcagaa

SEQ ID NO: 1304 - DNA, 20 bp, Artificial Sequence
  EGFR Forward Primer
acttccaggactgtgcacct

SEQ ID NO: 1305 - DNA, 20 bp, Artificial Sequence
  EGFR Forward Primer
cctcatggtcgtgttgactg

SEQ ID NO: 1306 - DNA, 22 bp, Artificial Sequence
  EGFR Forward Primer
tacaagtgtgatgttttccccc

SEQ ID NO: 1307 - DNA, 20 bp, Artificial Sequence
  EGFR Forward Primer
aaagtaggtgcctgccttcc

SEQ ID NO: 1308 - DNA, 20 bp, Artificial Sequence
  EGFR Forward Primer
tcagaaaagtgagccaggca

SEQ ID NO: 1309 - DNA, 20 bp, Artificial Sequence
  EGFR Forward Primer
tgaatctcaaggggttcctg

SEQ ID NO: 1310 - DNA, 20 bp, Artificial Sequence
  EGFR Forward Primer
atggggagtgacatcaggaa

SEQ ID NO: 1311 - DNA, 20 bp, Artificial Sequence
  EGFR Forward Primer
catcgattcaaaaagggcat

SEQ ID NO: 1312 - DNA, 20 bp, Artificial Sequence
  EGFR Forward Primer
taccaccatcctaaggccag

SEQ ID NO: 1313 - DNA, 20 bp, Artificial Sequence
  EGFR Forward Primer
cgtgtccctggtgaactttt

SEQ ID NO: 1314 - DNA, 20 bp, Artificial Sequence
  EGFR Forward Primer
ttgccacctttttagatcgg

SEQ ID NO: 1315 - DNA, 20 bp, Artificial Sequence
  EGFR Forward Primer
atactagcagagctggggca

SEQ ID NO: 1316 - DNA, 22 bp, Artificial Sequence
  EGFR Forward Primer
ccgagggtttgcatatgtgtat

SEQ ID NO: 1317 - DNA, 20 bp, Artificial Sequence
  EGFR Forward Primer
ggagaaggaagggaatccag

SEQ ID NO: 1318 - DNA, 21 bp, Artificial Sequence
  EGFR Forward Primer
agaaatgtcatgtccactggc

SEQ ID NO: 1319 - DNA, 21 bp, Artificial Sequence
  EGFR Forward Primer
aaactcgtgggaaaattggtt

SEQ ID NO: 1320 - DNA, 20 bp, Artificial Sequence
  EGFR Forward Primer
caggccttttgagagagtgc

SEQ ID NO: 1321 - DNA, 20 bp, Artificial Sequence
  EGFR Forward Primer
cccaaggatccctttgtagc

SEQ ID NO: 1322 - DNA, 20 bp, Artificial Sequence
  EGFR Forward Primer
ttgcatcgctgtgtctctct

SEQ ID NO: 1323 - DNA, 20 bp, Artificial Sequence
  EGFR Forward Primer
catcccccattttcctttta

SEQ ID NO: 1324 - DNA, 20 bp, Artificial Sequence
  EGFR Forward Primer
acactggtttggagtggagg

SEQ ID NO: 1325 - DNA, 20 bp, Artificial Sequence
  EGFR Forward Primer
gactttgctgggctggttta

SEQ ID NO: 1326 - DNA, 20 bp, Artificial Sequence
  EGFR Forward Primer
aaaggcggctctcttctctc

SEQ ID NO: 1327 - DNA, 20 bp, Artificial Sequence
  EGFR Forward Primer
gtcctagtagccagcagcgt

SEQ ID NO: 1328 - DNA, 23 bp, Artificial Sequence
  EGFR Forward Primer
atcgaaaagcatttaagtgatgc

SEQ ID NO: 1329 - DNA, 20 bp, Artificial Sequence
  EGFR Forward Primer
aaagacttggaggggagacc

SEQ ID NO: 1330 - DNA, 20 bp, Artificial Sequence
  EGFR Forward Primer
gtgcagcatgtgtcctcaat

SEQ ID NO: 1331 - DNA, 20 bp, Artificial Sequence
  EGFR Forward Primer
tctcctctgcctacctccaa

SEQ ID NO: 1332 - DNA, 20 bp, Artificial Sequence
  EGFR Forward Primer
cacagtgcaaccttcaatgc

SEQ ID NO: 1333 - DNA, 20 bp, Artificial Sequence
  EGFR Forward Primer
cggtcaaagccaggtgatta

SEQ ID NO: 1334 - DNA, 21 bp, Artificial Sequence
  EGFR Forward Primer
tgaatgtacatgtgtgcttgg

SEQ ID NO: 1335 - DNA, 20 bp, Artificial Sequence
  EGFR Forward Primer
caaggcttggagacttgctt

SEQ ID NO: 1336 - DNA, 20 bp, Artificial Sequence
  EGFR Forward Primer
tccagccaagatgacaacag

SEQ ID NO: 1337 - DNA, 20 bp, Artificial Sequence
  EGFR Forward Primer
cagcatacatgagcgtcacc

SEQ ID NO: 1338 - DNA, 20 bp, Artificial Sequence
  EGFR Forward Primer
tgcaacatgggattgagaaa

SEQ ID NO: 1339 - DNA, 19 bp, Artificial Sequence
  EGFR Forward Primer
agacgtcttgcagcgtcac

SEQ ID NO: 1340 - DNA, 20 bp, Artificial Sequence
  EGFR Forward Primer
gtccttacaagccttgcagc

SEQ ID NO: 1341 - DNA, 20 bp, Artificial Sequence
  EGFR Forward Primer
accaggtcaggtttctgcac

SEQ ID NO: 1342 - DNA, 20 bp, Artificial Sequence
  EGFR Forward Primer
aatccttgcaacaatccacg

SEQ ID NO: 1343 - DNA, 20 bp, Artificial Sequence
  EGFR Forward Primer
tcctgcactgcctctgatta

SEQ ID NO: 1344 - DNA, 20 bp, Artificial Sequence
  EGFR Forward Primer
ggggcagtgcaagtgtattt

SEQ ID NO: 1345 - DNA, 20 bp, Artificial Sequence
  EGFR Forward Primer
aattgatgcgctttttccac

SEQ ID NO: 1346 - DNA, 20 bp, Artificial Sequence
  EGFR Forward Primer
gcctcaataaccaggcagtc

SEQ ID NO: 1347 - DNA, 20 bp, Artificial Sequence
  EGFR Forward Primer
agcctggattggtgcttaga

SEQ ID NO: 1348 - DNA, 20 bp, Artificial Sequence
  EGFR Forward Primer
aattactgtcatggcggagc

SEQ ID NO: 1349 - DNA, 20 bp, Artificial Sequence
  EGFR Forward Primer
taatgaagcaaagcatggca

SEQ ID NO: 1350 - DNA, 23 bp, Artificial Sequence
  EGFR Forward Primer
catgcattccagtaattcaacaa

SEQ ID NO: 1351 - DNA, 20 bp, Artificial Sequence
  EGFR Forward Primer
ggcctttgcagaggatgtag

SEQ ID NO: 1352 - DNA, 20 bp, Artificial Sequence
  EGFR Forward Primer
tggtgagggtagggagtgag

SEQ ID NO: 1353 - DNA, 20 bp, Artificial Sequence
  EGFR Forward Primer
tacgtgcaggaactggtctg

SEQ ID NO: 1354 - DNA, 20 bp, Artificial Sequence
  EGFR Forward Primer
gtagccagggaaagggaaag

SEQ ID NO: 1355 - DNA, 20 bp, Artificial Sequence
  EGFR Forward Primer
gcacaggatccctgctagac

SEQ ID NO: 1356 - DNA, 20 bp, Artificial Sequence
  EGFR Forward Primer
atgttgccttcataggggtg

SEQ ID NO: 1357 - DNA, 20 bp, Artificial Sequence
  EGFR Forward Primer
cccgcagtaaagaggacaag

SEQ ID NO: 1358 - DNA, 20 bp, Artificial Sequence
  EGFR Forward Primer
cgctgtcagcattcagagac

SEQ ID NO: 1359 - DNA, 20 bp, Artificial Sequence
  EGFR Forward Primer
tgaaagaggggcttttatgc

SEQ ID NO: 1360 - DNA, 20 bp, Artificial Sequence
  EGFR Forward Primer
cagaggatgggaaggcataa

SEQ ID NO: 1361 - DNA, 20 bp, Artificial Sequence
  EGFR Forward Primer
gtgtaaagttgcctccccaa

SEQ ID NO: 1362 - DNA, 20 bp, Artificial Sequence
  EGFR Forward Primer
atcaaggagtgagtcacggg

SEQ ID NO: 1363 - DNA, 20 bp, Artificial Sequence
  EGFR Forward Primer
gagggacgtgaagtcagagg

SEQ ID NO: 1364 - DNA, 20 bp, Artificial Sequence
  EGFR Forward Primer
cttctctggcaggtctgagg

SEQ ID NO: 1365 - DNA, 20 bp, Artificial Sequence
  EGFR Forward Primer
caacgggtattgctttctga

SEQ ID NO: 1366 - DNA, 20 bp, Artificial Sequence
  EGFR Forward Primer
tactgctcacaactgccctg

SEQ ID NO: 1367 - DNA, 20 bp, Artificial Sequence
  EGFR Forward Primer
gtgggaactcccaagaggta

SEQ ID NO: 1368 - DNA, 25 bp, Artificial Sequence
  EGFR Forward Primer
cacatgtgtattttcaagttccaat

SEQ ID NO: 1369 - DNA, 23 bp, Artificial Sequence
  EGFR Forward Primer
gccttctttagccttctttaaca

SEQ ID NO: 1370 - DNA, 20 bp, Artificial Sequence
  EGFR Forward Primer
aacctctggcaaactcgcta

SEQ ID NO: 1371 - DNA, 20 bp, Artificial Sequence
  EGFR Forward Primer
gggagagactgacaacagcc

SEQ ID NO: 1372 - DNA, 20 bp, Artificial Sequence
  EGFR Forward Primer
cacagggcctaccctacaaa

SEQ ID NO: 1373 - DNA, 20 bp, Artificial Sequence
  EGFR Forward Primer
agggtttcgatcatgacagg

SEQ ID NO: 1374 - DNA, 20 bp, Artificial Sequence
  EGFR Forward Primer
gatttgcaaagggtaaggca

SEQ ID NO: 1375 - DNA, 20 bp, Artificial Sequence
  EGFR Forward Primer
cccaatgaggaagtggctaa

SEQ ID NO: 1376 - DNA, 20 bp, Artificial Sequence
  EGFR Forward Primer
atgctgctgtctccttttgg

SEQ ID NO: 1377 - DNA, 21 bp, Artificial Sequence
  EGFR Forward Primer
tcctcagaatacgtttcccaa

SEQ ID NO: 1378 - DNA, 24 bp, Artificial Sequence
  EGFR Forward Primer
aaatggcatgttttcctttatttt

SEQ ID NO: 1379 - DNA, 20 bp, Artificial Sequence
  EGFR Forward Primer
ctacctggacgacagccaat

SEQ ID NO: 1380 - DNA, 20 bp, Artificial Sequence
  EGFR Forward Primer
tcagagcaacctcatttccc

SEQ ID NO: 1381 - DNA, 20 bp, Artificial Sequence
  EGFR Forward Primer
gctcatttccatggctcatt

SEQ ID NO: 1382 - DNA, 20 bp, Artificial Sequence
  EGFR Forward Primer
aatccaacatccaaagccag

SEQ ID NO: 1383 - DNA, 19 bp, Artificial Sequence
  EGFR Forward Primer
agtaactgtgcctccgcct

SEQ ID NO: 1384 - DNA, 20 bp, Artificial Sequence
  EGFR Forward Primer
acattcattgcacgcacaac

SEQ ID NO: 1385 - DNA, 20 bp, Artificial Sequence
  EGFR Forward Primer
tgggtgagtctctgtgtgga

SEQ ID NO: 1386 - DNA, 20 bp, Artificial Sequence
  EGFR Forward Primer
ctaagtggagaaaggcctgg

SEQ ID NO: 1387 - DNA, 20 bp, Artificial Sequence
  EGFR Forward Primer
ttgttgcagatcgtggacat

SEQ ID NO: 1388 - DNA, 20 bp, Artificial Sequence
  EGFR Forward Primer
tttacagggtgagaggctgg

SEQ ID NO: 1389 - DNA, 20 bp, Artificial Sequence
  EGFR Forward Primer
gctgctacacagaaagccct

SEQ ID NO: 1390 - DNA, 20 bp, Artificial Sequence
  EGFR Forward Primer
ttaaatcatgctaagccggg

SEQ ID NO: 1391 - DNA, 20 bp, Artificial Sequence
  EGFR Forward Primer
atatccggagtgacaggagc

SEQ ID NO: 1392 - DNA, 20 bp, Artificial Sequence
  EGFR Forward Primer
cttcaaaaatgtggatggca

SEQ ID NO: 1393 - DNA, 20 bp, Artificial Sequence
  EGFR Forward Primer
cctgagttccatccacctgt

SEQ ID NO: 1394 - DNA, 20 bp, Artificial Sequence
  EGFR Forward Primer
tcctttcccacgttggtact

SEQ ID NO: 1395 - DNA, 20 bp, Artificial Sequence
  EGFR Forward Primer
tcatcagtggaacactccca

SEQ ID NO: 1396 - DNA, 20 bp, Artificial Sequence
  EGFR Forward Primer
attctcttccttcctcccca

SEQ ID NO: 1397 - DNA, 20 bp, Artificial Sequence
  EGFR Forward Primer
aaagagtgctcaccgcagtt

SEQ ID NO: 1398 - DNA, 20 bp, Artificial Sequence
  EGFR Forward Primer
aggggagagaagccatgttt

SEQ ID NO: 1399 - DNA, 20 bp, Artificial Sequence
  EGFR Forward Primer
aacactgccacatggagtca

SEQ ID NO: 1400 - DNA, 20 bp, Artificial Sequence
  EGFR Forward Primer
ctcagctgtctggtggacaa

SEQ ID NO: 1401 - DNA, 21 bp, Artificial Sequence
  EGFR Forward Primer
agaactgacatttcaagccaa

SEQ ID NO: 1402 - DNA, 20 bp, Artificial Sequence
  EGFR Forward Primer
cgttcctgctcagaatggat

SEQ ID NO: 1403 - DNA, 25 bp, Artificial Sequence
  EGFR Forward Primer
tatatgtaagtgccagaaggaaaca

SEQ ID NO: 1404 - DNA, 20 bp, Artificial Sequence
  EGFR Forward Primer
agcatcacaccttcctttgc

SEQ ID NO: 1405 - DNA, 20 bp, Artificial Sequence
  EGFR Forward Primer
caagaattccttgcagcctt

SEQ ID NO: 1406 - DNA, 20 bp, Artificial Sequence
  EGFR Forward Primer
tacgatgtgcctgcatttct

SEQ ID NO: 1407 - DNA, 20 bp, Artificial Sequence
  EGFR Forward Primer
tagctgcttttagcacgcct

SEQ ID NO: 1408 - DNA, 20 bp, Artificial Sequence
  EGFR Forward Primer
aattcttcctgactgcaggg

SEQ ID NO: 1409 - DNA, 20 bp, Artificial Sequence
  EGFR Forward Primer
tgcaccattctgtgcttctc

SEQ ID NO: 1410 - DNA, 20 bp, Artificial Sequence
  EGFR Forward Primer
cttgcttatgtggcccatgt

SEQ ID NO: 1411 - DNA, 20 bp, Artificial Sequence
  EGFR Forward Primer
gaggagaactgccagaaacg

SEQ ID NO: 1412 - DNA, 20 bp, Artificial Sequence
  EGFR Forward Primer
ctgctttacgatggagaggg

SEQ ID NO: 1413 - DNA, 20 bp, Artificial Sequence
  EGFR Forward Primer
tcacagggaacctttgctct

SEQ ID NO: 1414 - DNA, 20 bp, Artificial Sequence
  EGFR Forward Primer
gacaggatattgccctctgc

SEQ ID NO: 1415 - DNA, 20 bp, Artificial Sequence
  EGFR Forward Primer
gccagcagcacactctcttt

SEQ ID NO: 1416 - DNA, 20 bp, Artificial Sequence
  EGFR Forward Primer
gaagcgtcttggaagtcctg

SEQ ID NO: 1417 - DNA, 20 bp, Artificial Sequence
  EGFR Forward Primer
tagcaaggctttctgccatt

SEQ ID NO: 1418 - DNA, 20 bp, Artificial Sequence
  EGFR Forward Primer
gctttctgacgggagtcaac

SEQ ID NO: 1419 - DNA, 20 bp, Artificial Sequence
  EGFR Forward Primer
agccctggagtatcccatct

SEQ ID NO: 1420 - DNA, 21 bp, Artificial Sequence
  EGFR Forward Primer
ttttaccctgccagatttgtg

SEQ ID NO: 1421 - DNA, 20 bp, Artificial Sequence
  EGFR Forward Primer
tttcctgccatgatgaaaca

SEQ ID NO: 1422 - DNA, 20 bp, Artificial Sequence
  EGFR Forward Primer
gtgtaagaagtgcgaagggc

SEQ ID NO: 1423 - DNA, 20 bp, Artificial Sequence
  EGFR Forward Primer
gcaaggtcagtgtgaggtga

SEQ ID NO: 1424 - DNA, 21 bp, Artificial Sequence
  EGFR Forward Primer
tctctgcagtgtgtaacggaa

SEQ ID NO: 1425 - DNA, 20 bp, Artificial Sequence
  EGFR Forward Primer
tggatccacaggaactggat

SEQ ID NO: 1426 - DNA, 20 bp, Artificial Sequence
  EGFR Forward Primer
gcctcaggcttttgaaactg

SEQ ID NO: 1427 - DNA, 18 bp, Artificial Sequence
  EGFR Forward Primer
agacatgcggaatcgcag

SEQ ID NO: 1428 - DNA, 20 bp, Artificial Sequence
  EGFR Forward Primer
gccttacagggtttttgctg

SEQ ID NO: 1429 - DNA, 19 bp, Artificial Sequence
  EGFR Forward Primer
gcaagactgcacgaccact

SEQ ID NO: 1430 - DNA, 20 bp, Artificial Sequence
  EGFR Forward Primer
agacatgcaggtgctcacac

SEQ ID NO: 1431 - DNA, 20 bp, Artificial Sequence
  EGFR Forward Primer
tcctactgagacagggtggc

SEQ ID NO: 1432 - DNA, 20 bp, Artificial Sequence
  EGFR Forward Primer
gccatccaacacctgaacat

SEQ ID NO: 1433 - DNA, 20 bp, Artificial Sequence
  EGFR Forward Primer
tgctctttgcttccatgttg

SEQ ID NO: 1434 - DNA, 20 bp, Artificial Sequence
  EGFR Forward Primer
ctcccacagcatgacctacc

SEQ ID NO: 1435 - DNA, 20 bp, Artificial Sequence
  EGFR Forward Primer
ctccggtcagaaaaccaaaa

SEQ ID NO: 1436 - DNA, 20 bp, Artificial Sequence
  EGFR Forward Primer
ccctgaggtttaggctacca

SEQ ID NO: 1437 - DNA, 20 bp, Artificial Sequence
  EGFR Forward Primer
ttgagcctctgtcaattccc

SEQ ID NO: 1438 - DNA, 20 bp, Artificial Sequence
  EGFR Forward Primer
catcaaaacacaccctgtgc

SEQ ID NO: 1439 - DNA, 20 bp, Artificial Sequence
  EGFR Forward Primer
cactgactgctgtgacccac

SEQ ID NO: 1440 - DNA, 20 bp, Artificial Sequence
  EGFR Forward Primer
gggaagttgtttgattgcgt

SEQ ID NO: 1441 - DNA, 21 bp, Artificial Sequence
  EGFR Forward Primer
tgcagtttgtgaatgctctga

SEQ ID NO: 1442 - DNA, 20 bp, Artificial Sequence
  EGFR Forward Primer
gaggcaaggtgatgaaaacg

SEQ ID NO: 1443 - DNA, 21 bp, Artificial Sequence
  EGFR Forward Primer
tgctggagggtagaactatgc

SEQ ID NO: 1444 - DNA, 20 bp, Artificial Sequence
  EGFR Forward Primer
gggaacacctcctcaggact

SEQ ID NO: 1445 - DNA, 20 bp, Artificial Sequence
  EGFR Forward Primer
tctcagtgagccaagggagt

SEQ ID NO: 1446 - DNA, 21 bp, Artificial Sequence
  EGFR Forward Primer
tccctgacctagtcagcattg

SEQ ID NO: 1447 - DNA, 20 bp, Artificial Sequence
  EGFR Forward Primer
ttgcatggtgttgggttaaa

SEQ ID NO: 1448 - DNA, 20 bp, Artificial Sequence
  EGFR Forward Primer
tgatatgccaaccactgcac

SEQ ID NO: 1449 - DNA, 20 bp, Artificial Sequence
  EGFR Forward Primer
tatcatttggctttccccac

SEQ ID NO: 1450 - DNA, 20 bp, Artificial Sequence
  EGFR Forward Primer
ttaaggtgttttggtcccca

SEQ ID NO: 1451 - DNA, 20 bp, Artificial Sequence
  EGFR Forward Primer
tgaggacgtgggagtaacaa

SEQ ID NO: 1452 - DNA, 20 bp, Artificial Sequence
  EGFR Forward Primer
ttcatattttcgcctttggg

SEQ ID NO: 1453 - DNA, 23 bp, Artificial Sequence
  EGFR Forward Primer
tcagtatctctgtgtcagtgagc

SEQ ID NO: 1454 - DNA, 21 bp, Artificial Sequence
  EGFR Forward Primer
tcccactaaaactgcatttcc

SEQ ID NO: 1455 - DNA, 20 bp, Artificial Sequence
  EGFR Forward Primer
tacggccaagtgttgatgag

SEQ ID NO: 1456 - DNA, 20 bp, Artificial Sequence
  EGFR Forward Primer
tcaagtgggagccagagaat

SEQ ID NO: 1457 - DNA, 20 bp, Artificial Sequence
  EGFR Forward Primer
agcattttcagagcctgcat

SEQ ID NO: 1458 - DNA, 20 bp, Artificial Sequence
  EGFR Forward Primer
gaagcctgtgtgtttggttt

SEQ ID NO: 1459 - DNA, 20 bp, Artificial Sequence
  EGFR Forward Primer
caggccaggaaatgagagtc

SEQ ID NO: 1460 - DNA, 20 bp, Artificial Sequence
  EGFR Forward Primer
tagctaaccatcacccccag

SEQ ID NO: 1461 - DNA, 22 bp, Artificial Sequence
  EGFR Forward Primer
tgctgagtgaatgaacaaatga

SEQ ID NO: 1462 - DNA, 20 bp, Artificial Sequence
  EGFR Forward Primer
tcacatggacctcgtcaaga

SEQ ID NO: 1463 - DNA, 20 bp, Artificial Sequence
  EGFR Forward Primer
tccttgctttctttcccaga

SEQ ID NO: 1464 - DNA, 20 bp, Artificial Sequence
  EGFR Forward Primer
ccctctgccatctctggtaa

SEQ ID NO: 1465 - DNA, 20 bp, Artificial Sequence
  EGFR Forward Primer
tcagggatcttagtcacggg

SEQ ID NO: 1466 - DNA, 20 bp, Artificial Sequence
  EGFR Forward Primer
gacatgacctctgtgggagg

SEQ ID NO: 1467 - DNA, 20 bp, Artificial Sequence
  EGFR Forward Primer
gtgcctggtccatgtgtatg

SEQ ID NO: 1468 - DNA, 20 bp, Artificial Sequence
  EGFR Forward Primer
atctgtcagcaacctcaccc

SEQ ID NO: 1469 - DNA, 20 bp, Artificial Sequence
  EGFR Forward Primer
acaaagctgtgtggcatctg

SEQ ID NO: 1470 - DNA, 20 bp, Artificial Sequence
  EGFR Forward Primer
ctcataagcataagcgcgtg

SEQ ID NO: 1471 - DNA, 20 bp, Artificial Sequence
  EGFR Forward Primer
ttgtggagcctcttacaccc

SEQ ID NO: 1472 - DNA, 21 bp, Artificial Sequence
  EGFR Forward Primer
tgagtgtttgggaaactccag

SEQ ID NO: 1473 - DNA, 20 bp, Artificial Sequence
  EGFR Forward Primer
tggatgaaatgatccacacg

SEQ ID NO: 1474 - DNA, 20 bp, Artificial Sequence
  EGFR Forward Primer
ctggatcccagaaggtgaga

SEQ ID NO: 1475 - DNA, 20 bp, Artificial Sequence
  EGFR Forward Primer
ccccttagagacagcactgg

SEQ ID NO: 1476 - DNA, 20 bp, Artificial Sequence
  EGFR Forward Primer
gaatatgatggcgtgcagtc

SEQ ID NO: 1477 - DNA, 20 bp, Artificial Sequence
  EGFR Forward Primer
cctcttctacactggcctgg

SEQ ID NO: 1478 - DNA, 20 bp, Artificial Sequence
  EGFR Forward Primer
gggcagcttttcttcctttt

SEQ ID NO: 1479 - DNA, 20 bp, Artificial Sequence
  EGFR Forward Primer
tacaatctctggcccctcac

SEQ ID NO: 1480 - DNA, 20 bp, Artificial Sequence
  EGFR Forward Primer
cttgccccatgtttcttcac

SEQ ID NO: 1481 - DNA, 20 bp, Artificial Sequence
  EGFR Forward Primer
aaagaaagcaaaagccagca

SEQ ID NO: 1482 - DNA, 20 bp, Artificial Sequence
  EGFR Forward Primer
ggctttcaaggtcacaaagc

SEQ ID NO: 1483 - DNA, 20 bp, Artificial Sequence
  EGFR Forward Primer
gactgaacagcgttcccatt

SEQ ID NO: 1484 - DNA, 20 bp, Artificial Sequence
  EGFR Forward Primer
tgtgtgtgtctcccacgtct

SEQ ID NO: 1485 - DNA, 20 bp, Artificial Sequence
  EGFR Forward Primer
gacaaaatacgcttcctggc

SEQ ID NO: 1486 - DNA, 20 bp, Artificial Sequence
  EGFR Forward Primer
gcctggactttgacttgctt

SEQ ID NO: 1487 - DNA, 20 bp, Artificial Sequence
  EGFR Forward Primer
cttggtggggagggtatttt

SEQ ID NO: 1488 - DNA, 20 bp, Artificial Sequence
  EGFR Forward Primer
tgaagagtcgaggaaggctc

SEQ ID NO: 1489 - DNA, 20 bp, Artificial Sequence
  EGFR Forward Primer
agcagctgtggatgctttct

SEQ ID NO: 1490 - DNA, 20 bp, Artificial Sequence
  EGFR Forward Primer
tccatttcaaaacctgggac

SEQ ID NO: 1491 - DNA, 20 bp, Artificial Sequence
  EGFR Forward Primer
ggcggaggtcttcataacaa

SEQ ID NO: 1492 - DNA, 20 bp, Artificial Sequence
  EGFR Forward Primer
cattcatgcgtcttcacctg

SEQ ID NO: 1493 - DNA, 20 bp, Artificial Sequence
  EGFR Forward Primer
gtgtgcagatcgcaaaggta

SEQ ID NO: 1494 - DNA, 20 bp, Artificial Sequence
  EGFR Forward Primer
acccaggtgatagtggtgga

SEQ ID NO: 1495 - DNA, 21 bp, Artificial Sequence
  EGFR Forward Primer
ggacccagaaagacttctgct

SEQ ID NO: 1496 - DNA, 20 bp, Artificial Sequence
  EGFR Forward Primer
agtcagtcctgccgagtcat

SEQ ID NO: 1497 - DNA, 20 bp, Artificial Sequence
  EGFR Forward Primer
ccccttttactccagcatca

SEQ ID NO: 1498 - DNA, 20 bp, Artificial Sequence
  EGFR Forward Primer
ctgaagcagggaatggagag

SEQ ID NO: 1499 - DNA, 20 bp, Artificial Sequence
  EGFR Forward Primer
aggatgagctcaggactcca

SEQ ID NO: 1500 - DNA, 20 bp, Artificial Sequence
  EGFR Forward Primer
ttcctgatctctgctgctca

SEQ ID NO: 1501 - DNA, 20 bp, Artificial Sequence
  EGFR Forward Primer
cctggagggaaatgaaaaca

SEQ ID NO: 1502 - DNA, 20 bp, Artificial Sequence
  EGFR Forward Primer
cagaggtgtcttgggaggaa

SEQ ID NO: 1503 - DNA, 20 bp, Artificial Sequence
  EGFR Forward Primer
gccattcagactgcaactca

SEQ ID NO: 1504 - DNA, 20 bp, Artificial Sequence
  EGFR Forward Primer
gctttcacggctctgctact

SEQ ID NO: 1505 - DNA, 20 bp, Artificial Sequence
  EGFR Forward Primer
tgaaagtgacactgggtgga

SEQ ID NO: 1506 - DNA, 20 bp, Artificial Sequence
  EGFR Forward Primer
ttgcgtattccacaaagggt

SEQ ID NO: 1507 - DNA, 20 bp, Artificial Sequence
  EGFR Forward Primer
aatggaatgggtctgtcagc

SEQ ID NO: 1508 - DNA, 20 bp, Artificial Sequence
  EGFR Forward Primer
agatggtggccaaattcaag

SEQ ID NO: 1509 - DNA, 20 bp, Artificial Sequence
  EGFR Forward Primer
ttactctatgcctgcctggg

SEQ ID NO: 1510 - DNA, 20 bp, Artificial Sequence
  EGFR Forward Primer
ggctaaaaggttgaggggag

SEQ ID NO: 1511 - DNA, 20 bp, Artificial Sequence
  EGFR Forward Primer
actgctccatgagctcttcc

SEQ ID NO: 1512 - DNA, 20 bp, Artificial Sequence
  EGFR Forward Primer
tccccttttaacctcagtgc

SEQ ID NO: 1513 - DNA, 20 bp, Artificial Sequence
  EGFR Forward Primer
agacccatgcgtcaagtctc

SEQ ID NO: 1514 - DNA, 20 bp, Artificial Sequence
  EGFR Forward Primer
ggggtctcagggtatttggt

SEQ ID NO: 1515 - DNA, 20 bp, Artificial Sequence
  EGFR Forward Primer
ttagcagtggtggtgaaacg

SEQ ID NO: 1516 - DNA, 20 bp, Artificial Sequence
  EGFR Forward Primer
tgagggtgagaaatcaaggg

SEQ ID NO: 1517 - DNA, 20 bp, Artificial Sequence
  EGFR Forward Primer
ctctcctctccctttccacc

SEQ ID NO: 1518 - DNA, 20 bp, Artificial Sequence
  EGFR Forward Primer
ttgggaatccatccacatct

SEQ ID NO: 1519 - DNA, 20 bp, Artificial Sequence
  EGFR Forward Primer
agtctgcagaacttgacccc

SEQ ID NO: 1520 - DNA, 20 bp, Artificial Sequence
  EGFR Forward Primer
cagagatttcaattgcagcg

SEQ ID NO: 1521 - DNA, 20 bp, Artificial Sequence
  EGFR Forward Primer
aagttcaagcccaggtctca

SEQ ID NO: 1522 - DNA, 20 bp, Artificial Sequence
  EGFR Forward Primer
cctcacagcagggtcttctc

SEQ ID NO: 1523 - DNA, 20 bp, Artificial Sequence
  EGFR Forward Primer
tgtttaacacatgcagggga

SEQ ID NO: 1524 - DNA, 20 bp, Artificial Sequence
  EGFR Forward Primer
ctaaggaacaggaaaggccc

SEQ ID NO: 1525 - DNA, 20 bp, Artificial Sequence
  EGFR Forward Primer
gggtgctcagaaacctacca

SEQ ID NO: 1526 - DNA, 20 bp, Artificial Sequence
  EGFR Forward Primer
tgatgtctggagctacggtg

SEQ ID NO: 1527 - DNA, 20 bp, Artificial Sequence
  EGFR Forward Primer
agcttaggaaacggctctcc

SEQ ID NO: 1528 - DNA, 20 bp, Artificial Sequence
  EGFR Forward Primer
gagatgacccttgcttctcg

SEQ ID NO: 1529 - DNA, 20 bp, Artificial Sequence
  EGFR Forward Primer
ttggtccttgaatttcaccc

SEQ ID NO: 1530 - DNA, 20 bp, Artificial Sequence
  EGFR Forward Primer
gtttggtgtgcacctgtgag

SEQ ID NO: 1531 - DNA, 21 bp, Artificial Sequence
  EGFR Forward Primer
tggtcctccaggtatgttcag

SEQ ID NO: 1532 - DNA, 20 bp, Artificial Sequence
  EGFR Forward Primer
gaagtccgttcccactgaaa

SEQ ID NO: 1533 - DNA, 20 bp, Artificial Sequence
  EGFR Forward Primer
agcccattctccacctaaca

SEQ ID NO: 1534 - DNA, 20 bp, Artificial Sequence
  EGFR Forward Primer
ccattgctttccttccaatg

SEQ ID NO: 1535 - DNA, 23 bp, Artificial Sequence
  EGFR Forward Primer
aagctttttcatttccaattttt

SEQ ID NO: 1536 - DNA, 20 bp, Artificial Sequence
  EGFR Forward Primer
ttgggtccttacagcaatcc

SEQ ID NO: 1537 - DNA, 20 bp, Artificial Sequence
  EGFR Forward Primer
agtgactggtgggtctgtcc

SEQ ID NO: 1538 - DNA, 20 bp, Artificial Sequence
  EGFR Forward Primer
aagtcttccgcaagccatta

SEQ ID NO: 1539 - DNA, 20 bp, Artificial Sequence
  EGFR Forward Primer
ccagattcacgagtgcagtg

SEQ ID NO: 1540 - DNA, 20 bp, Artificial Sequence
  EGFR Forward Primer
cagtgtgtcctcctgtggaa

SEQ ID NO: 1541 - DNA, 20 bp, Artificial Sequence
  EGFR Forward Primer
cctcaggcgtaacacaggat

SEQ ID NO: 1542 - DNA, 20 bp, Artificial Sequence
  EGFR Forward Primer
cagcgctaccttgtcattca

SEQ ID NO: 1543 - DNA, 20 bp, Artificial Sequence
  EGFR Forward Primer
ccgtctgaactctcctctgg

SEQ ID NO: 1544 - DNA, 20 bp, Artificial Sequence
  EGFR Forward Primer
atgttgcaaaatacgctccc

SEQ ID NO: 1545 - DNA, 20 bp, Artificial Sequence
  EGFR Forward Primer
tagcatctctacgggccatt

SEQ ID NO: 1546 - DNA, 22 bp, Artificial Sequence
  EGFR Forward Primer
tgcaacaacttgattgtaagcc

SEQ ID NO: 1547 - DNA, 20 bp, Artificial Sequence
  EGFR Forward Primer
cttcctgtgtgggtttttcc

SEQ ID NO: 1548 - DNA, 20 bp, Artificial Sequence
  EGFR Forward Primer
gctcatagcacacctccctc

SEQ ID NO: 1549 - DNA, 20 bp, Artificial Sequence
  EGFR Forward Primer
agacagcttcttgcagcgat

SEQ ID NO: 1550 - DNA, 20 bp, Artificial Sequence
  EGFR Forward Primer
ttttgcagcaacagcaagag

SEQ ID NO: 1551 - DNA, 20 bp, Artificial Sequence
  EGFR Forward Primer
gaaaggcagccaccaaatta

SEQ ID NO: 1552 - DNA, 20 bp, Artificial Sequence
  EGFR Forward Primer
gaaacgcatccagcaagaat

SEQ ID NO: 1553 - DNA, 20 bp, Artificial Sequence
  EGFR Forward Primer
aaggagcacaagccacaagt

SEQ ID NO: 1554 - DNA, 20 bp, Artificial Sequence
  EGFR Forward Primer
tgtaaaaatgtccccacggt

SEQ ID NO: 1555 - DNA, 20 bp, Artificial Sequence
  EGFR Forward Primer
cctttggggcatagatcaga

SEQ ID NO: 1556 - DNA, 20 bp, Artificial Sequence
  EGFR Forward Primer
caagcacttacagctctggc

SEQ ID NO: 1557 - DNA, 20 bp, Artificial Sequence
  EGFR Forward Primer
tgtgccctgtaacctgactg

SEQ ID NO: 1558 - DNA, 21 bp, Artificial Sequence
  EGFR Forward Primer
gcctggtatgggtatgaaaga

SEQ ID NO: 1559 - DNA, 20 bp, Artificial Sequence
  EGFR Forward Primer
ggctgaggtcagtcacccta

SEQ ID NO: 1560 - DNA, 20 bp, Artificial Sequence
  EGFR Forward Primer
aagcagatgatcgatgaggc

SEQ ID NO: 1561 - DNA, 20 bp, Artificial Sequence
  EGFR Forward Primer
gtctggtagaagccgcaaag

SEQ ID NO: 1562 - DNA, 20 bp, Artificial Sequence
  EGFR Forward Primer
cccagcttcagatgtggtct

SEQ ID NO: 1563 - DNA, 20 bp, Artificial Sequence
  EGFR Forward Primer
cttagcaggaaaggcactgg

SEQ ID NO: 1564 - DNA, 20 bp, Artificial Sequence
  EGFR Forward Primer
gtgatgggaactcagcacct

SEQ ID NO: 1565 - DNA, 20 bp, Artificial Sequence
  EGFR Forward Primer
aatacccccacctgagcttt

SEQ ID NO: 1566 - DNA, 23 bp, Artificial Sequence
  EGFR Forward Primer
ttgaagacacagacaggattttt

SEQ ID NO: 1567 - DNA, 20 bp, Artificial Sequence
  EGFR Forward Primer
aaaaggcacaacctcattgg

SEQ ID NO: 1568 - DNA, 23 bp, Artificial Sequence
  EGFR Forward Primer
ccctgtacatgtaagaaaagcaa

SEQ ID NO: 1569 - DNA, 20 bp, Artificial Sequence
  EGFR Forward Primer
ccacatctgtcgctgagagt

SEQ ID NO: 1570 - DNA, 20 bp, Artificial Sequence
  EGFR Forward Primer
aagaaaacgctggcctatca

SEQ ID NO: 1571 - DNA, 20 bp, Artificial Sequence
  EGFR Forward Primer
cctgatttggccacaaaaat

SEQ ID NO: 1572 - DNA, 20 bp, Artificial Sequence
  EGFR Forward Primer
caagctcttcacatgccaga

SEQ ID NO: 1573 - DNA, 21 bp, Artificial Sequence
  EGFR Forward Primer
tgtgaacatcgttatgtggca

SEQ ID NO: 1574 - DNA, 20 bp, Artificial Sequence
  EGFR Forward Primer
catcagagagtggaccagca

SEQ ID NO: 1575 - DNA, 20 bp, Artificial Sequence
  EGFR Forward Primer
ttgcttttgtgctgttcctg

SEQ ID NO: 1576 - DNA, 20 bp, Artificial Sequence
  EGFR Forward Primer
ctcaggcacatgcaggttta

SEQ ID NO: 1577 - DNA, 20 bp, Artificial Sequence
  EGFR Forward Primer
gaagaggttttccctttggg

SEQ ID NO: 1578 - DNA, 21 bp, Artificial Sequence
  EGFR Forward Primer
aaacaaagcatgatagggagc

SEQ ID NO: 1579 - DNA, 20 bp, Artificial Sequence
  EGFR Forward Primer
ctgctcctgagagtcaaccc

SEQ ID NO: 1580 - DNA, 19 bp, Artificial Sequence
  EGFR Forward Primer
cgaggcccagaaaagagag

SEQ ID NO: 1581 - DNA, 20 bp, Artificial Sequence
  EGFR Forward Primer
gtgcagctctatctcggagg

SEQ ID NO: 1582 - DNA, 20 bp, Artificial Sequence
  EGFR Forward Primer
cacgcttctctctgcacttg

SEQ ID NO: 1583 - DNA, 20 bp, Artificial Sequence
  EGFR Forward Primer
tcagagcacaaaaagatggg

SEQ ID NO: 1584 - DNA, 20 bp, Artificial Sequence
  EGFR Forward Primer
gcccaatcacattgctgtta

SEQ ID NO: 1585 - DNA, 20 bp, Artificial Sequence
  EGFR Forward Primer
tgagatcctttgacctgcaa

SEQ ID NO: 1586 - DNA, 27 bp, Artificial Sequence
  EGFR Forward Primer
aaatgtgtgagaataatatgaaaacaa

SEQ ID NO: 1587 - DNA, 20 bp, Artificial Sequence
  EGFR Forward Primer
agccaacaacatttggaaaa

SEQ ID NO: 1588 - DNA, 20 bp, Artificial Sequence
  EGFR Forward Primer
tcaggaagaggaggtgatcc

SEQ ID NO: 1589 - DNA, 20 bp, Artificial Sequence
  EGFR Forward Primer
ctttccccttccttccactt

SEQ ID NO: 1590 - DNA, 20 bp, Artificial Sequence
  EGFR Forward Primer
gagggagagggagaggctaa

SEQ ID NO: 1591 - DNA, 20 bp, Artificial Sequence
  EGFR Forward Primer
tgagaaaggcccactagcat

SEQ ID NO: 1592 - DNA, 20 bp, Artificial Sequence
  EGFR Forward Primer
ccaaccccaaactaaaacca

SEQ ID NO: 1593 - DNA, 20 bp, Artificial Sequence
  EGFR Forward Primer
tgtgcagatgggaacagaga

SEQ ID NO: 1594 - DNA, 20 bp, Artificial Sequence
  EGFR Forward Primer
tccatccatccatttgttca

SEQ ID NO: 1595 - DNA, 20 bp, Artificial Sequence
  EGFR Forward Primer
tccaccttgccaggtctagt

SEQ ID NO: 1596 - DNA, 20 bp, Artificial Sequence
  EGFR Forward Primer
catcctcctcaccctatcca

SEQ ID NO: 1597 - DNA, 20 bp, Artificial Sequence
  EGFR Forward Primer
tagatccagaacagggcagc

SEQ ID NO: 1598 - DNA, 20 bp, Artificial Sequence
  EGFR Forward Primer
tggtggagagggacacctac

SEQ ID NO: 1599 - DNA, 20 bp, Artificial Sequence
  EGFR Forward Primer
catctcctgggtacctccaa

SEQ ID NO: 1600 - DNA, 25 bp, Artificial Sequence
  EGFR Forward Primer
catttttaattttctgatcacatgg

SEQ ID NO: 1601 - DNA, 20 bp, Artificial Sequence
  EGFR Forward Primer
ccaaccttcagttggcattt

SEQ ID NO: 1602 - DNA, 20 bp, Artificial Sequence
  EGFR Forward Primer
gatgcttctctggtgcttcc

SEQ ID NO: 1603 - DNA, 20 bp, Artificial Sequence
  EGFR Forward Primer
gcctaagtcccaggtcaaca

SEQ ID NO: 1604 - DNA, 20 bp, Artificial Sequence
  EGFR Forward Primer
ctagacgccgggttgtgtat

SEQ ID NO: 1605 - DNA, 20 bp, Artificial Sequence
  EGFR Forward Primer
agagagcagagtccaaccca

SEQ ID NO: 1606 - DNA, 20 bp, Artificial Sequence
  EGFR Forward Primer
ttctgggaacaagatcaggg

SEQ ID NO: 1607 - DNA, 20 bp, Artificial Sequence
  EGFR Forward Primer
tgggcactctctggcttatt

SEQ ID NO: 1608 - DNA, 20 bp, Artificial Sequence
  EGFR Forward Primer
cggcacagagcctcatttat

SEQ ID NO: 1609 - DNA, 20 bp, Artificial Sequence
  EGFR Forward Primer
ctgtcctccacggtgaattt

SEQ ID NO: 1610 - DNA, 20 bp, Artificial Sequence
  EGFR Forward Primer
taagagagagggtgacccca

SEQ ID NO: 1611 - DNA, 20 bp, Artificial Sequence
  EGFR Forward Primer
agagatgccccattgcttta

SEQ ID NO: 1612 - DNA, 20 bp, Artificial Sequence
  EGFR Forward Primer
taatgggtaggaccttggca

SEQ ID NO: 1613 - DNA, 20 bp, Artificial Sequence
  EGFR Forward Primer
gctggactcaggctttgtgt

SEQ ID NO: 1614 - DNA, 20 bp, Artificial Sequence
  EGFR Forward Primer
caaaccggcttctctctcag

SEQ ID NO: 1615 - DNA, 20 bp, Artificial Sequence
  EGFR Forward Primer
ggcacagctttcttctcagc

SEQ ID NO: 1616 - DNA, 20 bp, Artificial Sequence
  EGFR Forward Primer
ccagctgagactgtggaaca

SEQ ID NO: 1617 - DNA, 21 bp, Artificial Sequence
  EGFR Forward Primer
tcatgttttcctgattgctcc

SEQ ID NO: 1618 - DNA, 20 bp, Artificial Sequence
  EGFR Forward Primer
aagataatgccgccaatgac

SEQ ID NO: 1619 - DNA, 20 bp, Artificial Sequence
  EGFR Forward Primer
cgtgttcagccagtcatgtt

SEQ ID NO: 1620 - DNA, 20 bp, Artificial Sequence
  EGFR Forward Primer
agtgccggtcagtagtgctc

SEQ ID NO: 1621 - DNA, 20 bp, Artificial Sequence
  EGFR Forward Primer
caatgtcagtgccaaggaga

SEQ ID NO: 1622 - DNA, 20 bp, Artificial Sequence
  EGFR Forward Primer
gaaaatgccaagtgagggag

SEQ ID NO: 1623 - DNA, 21 bp, Artificial Sequence
  EGFR Forward Primer
gccaaataaatgatgatggca

SEQ ID NO: 1624 - DNA, 20 bp, Artificial Sequence
  EGFR Forward Primer
ctgcactcttcacaacgcat

SEQ ID NO: 1625 - DNA, 20 bp, Artificial Sequence
  EGFR Forward Primer
gaatgtgtatcctggtgccc

SEQ ID NO: 1626 - DNA, 20 bp, Artificial Sequence
  EGFR Forward Primer
aacacccagccctgatttta

SEQ ID NO: 1627 - DNA, 20 bp, Artificial Sequence
  EGFR Forward Primer
caaactggaccaaccctgtt

SEQ ID NO: 1628 - DNA, 20 bp, Artificial Sequence
  EGFR Forward Primer
ccctgtgtgtctgcaaaatg

SEQ ID NO: 1629 - DNA, 20 bp, Artificial Sequence
  EGFR Forward Primer
catctgttcatgccactgct

SEQ ID NO: 1630 - DNA, 20 bp, Artificial Sequence
  EGFR Forward Primer
gggtcaggtttcctctccat

SEQ ID NO: 1631 - DNA, 20 bp, Artificial Sequence
  EGFR Forward Primer
tccactatttcctggatcgc

SEQ ID NO: 1632 - DNA, 20 bp, Artificial Sequence
  EGFR Forward Primer
ttcccttgtggtctcctttg

SEQ ID NO: 1633 - DNA, 20 bp, Artificial Sequence
  EGFR Forward Primer
tttattgccatccatcccat

SEQ ID NO: 1634 - DNA, 21 bp, Artificial Sequence
  EGFR Forward Primer
ggacctccttgggtagaaaga

SEQ ID NO: 1635 - DNA, 20 bp, Artificial Sequence
  EGFR Forward Primer
ctgtgcagattgcaaaggaa

SEQ ID NO: 1636 - DNA, 20 bp, Artificial Sequence
  EGFR Forward Primer
attggctcctcaaaaagcag

SEQ ID NO: 1637 - DNA, 20 bp, Artificial Sequence
  EGFR Forward Primer
aggtcgaatcatccatcagg

SEQ ID NO: 1638 - DNA, 20 bp, Artificial Sequence
  EGFR Forward Primer
cctttgcccatgtttgtctt

SEQ ID NO: 1639 - DNA, 20 bp, Artificial Sequence
  EGFR Forward Primer
agctggagaaggtagggtgg

SEQ ID NO: 1640 - DNA, 20 bp, Artificial Sequence
  EGFR Forward Primer
ggatgccactaagaagtccg

SEQ ID NO: 1641 - DNA, 20 bp, Artificial Sequence
  EGFR Forward Primer
acttgcagactgggaggaga

SEQ ID NO: 1642 - DNA, 20 bp, Artificial Sequence
  EGFR Forward Primer
ttggacttcaaaccctctgg

SEQ ID NO: 1643 - DNA, 20 bp, Artificial Sequence
  EGFR Forward Primer
ctcctaccctctctccccac

SEQ ID NO: 1644 - DNA, 20 bp, Artificial Sequence
  EGFR Forward Primer
gcaggagtcagaggagagga

SEQ ID NO: 1645 - DNA, 20 bp, Artificial Sequence
  EGFR Forward Primer
tgaaaatgaccgttggtctg

SEQ ID NO: 1646 - DNA, 20 bp, Artificial Sequence
  EGFR Forward Primer
atctgtgtctctcgcctcgt

SEQ ID NO: 1647 - DNA, 20 bp, Artificial Sequence
  EGFR Forward Primer
cgtgtgacaatgcaagaagg

SEQ ID NO: 1648 - DNA, 21 bp, Artificial Sequence
  EGFR Forward Primer
ccctggaattgtcagtctgtt

SEQ ID NO: 1649 - DNA, 20 bp, Artificial Sequence
  EGFR Forward Primer
cgacgtcctgtaagtggacc

SEQ ID NO: 1650 - DNA, 20 bp, Artificial Sequence
  EGFR Forward Primer
ttcattcggacttttcgacc

SEQ ID NO: 1651 - DNA, 20 bp, Artificial Sequence
  EGFR Forward Primer
gagggtcactggtcctcaaa

SEQ ID NO: 1652 - DNA, 20 bp, Artificial Sequence
  EGFR Forward Primer
agaaaggattttgtgggcaa

SEQ ID NO: 1653 - DNA, 20 bp, Artificial Sequence
  EGFR Reverse Primer
gggtgccctgaggagttaat

SEQ ID NO: 1654 - DNA, 20 bp, Artificial Sequence
  EGFR Reverse Primer
ggggaaagtgagggaagaaa

SEQ ID NO: 1655 - DNA, 20 bp, Artificial Sequence
  EGFR Reverse Primer
gcaggtggtggtagacgagt

SEQ ID NO: 1656 - DNA, 18 bp, Artificial Sequence
  EGFR Reverse Primer
gggcttccgctcaagagt

SEQ ID NO: 1657 - DNA, 20 bp, Artificial Sequence
  EGFR Reverse Primer
gaacaccaatggagggagaa

SEQ ID NO: 1658 - DNA, 20 bp, Artificial Sequence
  EGFR Reverse Primer
agcatgtcccagaaccaaac

SEQ ID NO: 1659 - DNA, 20 bp, Artificial Sequence
  EGFR Reverse Primer
ctcctgaaaccagaactcgg

SEQ ID NO: 1660 - DNA, 20 bp, Artificial Sequence
  EGFR Reverse Primer
gaatgggaacgtctccagaa

SEQ ID NO: 1661 - DNA, 20 bp, Artificial Sequence
  EGFR Reverse Primer
ccttcaacctttagcccaga

SEQ ID NO: 1662 - DNA, 20 bp, Artificial Sequence
  EGFR Reverse Primer
acaatggactttcggcaatc

SEQ ID NO: 1663 - DNA, 20 bp, Artificial Sequence
  EGFR Reverse Primer
cttcccttcagtgcccataa

SEQ ID NO: 1664 - DNA, 23 bp, Artificial Sequence
  EGFR Reverse Primer
gaaattttctcaacacatacccc

SEQ ID NO: 1665 - DNA, 20 bp, Artificial Sequence
  EGFR Reverse Primer
acacacccccaatattcctg

SEQ ID NO: 1666 - DNA, 26 bp, Artificial Sequence
  EGFR Reverse Primer
cagaatgagataaaacttggatcaga

SEQ ID NO: 1667 - DNA, 20 bp, Artificial Sequence
  EGFR Reverse Primer
ccttctatgcaaagggcaaa

SEQ ID NO: 1668 - DNA, 20 bp, Artificial Sequence
  EGFR Reverse Primer
ccttctcttcctgccatttg

SEQ ID NO: 1669 - DNA, 20 bp, Artificial Sequence
  EGFR Reverse Primer
cccctgtcctgaatcttcct

SEQ ID NO: 1670 - DNA, 20 bp, Artificial Sequence
  EGFR Reverse Primer
aagagatccccattccgagt

SEQ ID NO: 1671 - DNA, 20 bp, Artificial Sequence
  EGFR Reverse Primer
tgccaagggagctttaagaa

SEQ ID NO: 1672 - DNA, 20 bp, Artificial Sequence
  EGFR Reverse Primer
tctctttctcagcccttcca

SEQ ID NO: 1673 - DNA, 20 bp, Artificial Sequence
  EGFR Reverse Primer
ttccaggtttcctcatggtc

SEQ ID NO: 1674 - DNA, 21 bp, Artificial Sequence
  EGFR Reverse Primer
tcacaagtaccaatggctcaa

SEQ ID NO: 1675 - DNA, 20 bp, Artificial Sequence
  EGFR Reverse Primer
ctcaggacacctttgcctgt

SEQ ID NO: 1676 - DNA, 23 bp, Artificial Sequence
  EGFR Reverse Primer
tagttggagccattagatcttgc

SEQ ID NO: 1677 - DNA, 21 bp, Artificial Sequence
  EGFR Reverse Primer
aacaacaccacttttcaggga

SEQ ID NO: 1678 - DNA, 20 bp, Artificial Sequence
  EGFR Reverse Primer
gaggtgctgtacaaatgcga

SEQ ID NO: 1679 - DNA, 20 bp, Artificial Sequence
  EGFR Reverse Primer
aaagtgatggggcatccata

SEQ ID NO: 1680 - DNA, 20 bp, Artificial Sequence
  EGFR Reverse Primer
aggcattgctaactgaccca

SEQ ID NO: 1681 - DNA, 20 bp, Artificial Sequence
  EGFR Reverse Primer
ttcttctgggagaggcacat

SEQ ID NO: 1682 - DNA, 20 bp, Artificial Sequence
  EGFR Reverse Primer
tgcttttgcccaagtaacct

SEQ ID NO: 1683 - DNA, 20 bp, Artificial Sequence
  EGFR Reverse Primer
ccaagtcttctgcccttctg

SEQ ID NO: 1684 - DNA, 20 bp, Artificial Sequence
  EGFR Reverse Primer
ttttccttttccaaaatgcg

SEQ ID NO: 1685 - DNA, 20 bp, Artificial Sequence
  EGFR Reverse Primer
ggacatagggcgattgtgag

SEQ ID NO: 1686 - DNA, 20 bp, Artificial Sequence
  EGFR Reverse Primer
ttttcccttaaggcccattt

SEQ ID NO: 1687 - DNA, 20 bp, Artificial Sequence
  EGFR Reverse Primer
acttaaccagccagcaaagc

SEQ ID NO: 1688 - DNA, 20 bp, Artificial Sequence
  EGFR Reverse Primer
attttgacttccagcgtggt

SEQ ID NO: 1689 - DNA, 27 bp, Artificial Sequence
  EGFR Reverse Primer
aatagagagtaaatagaaagttgctgc

SEQ ID NO: 1690 - DNA, 19 bp, Artificial Sequence
  EGFR Reverse Primer
agttcaaggccagggcata

SEQ ID NO: 1691 - DNA, 20 bp, Artificial Sequence
  EGFR Reverse Primer
gggcaaagtcatgtagccat

SEQ ID NO: 1692 - DNA, 20 bp, Artificial Sequence
  EGFR Reverse Primer
gacccttggaaagtgtgcat

SEQ ID NO: 1693 - DNA, 19 bp, Artificial Sequence
  EGFR Reverse Primer
agatggttggcgcattttt

SEQ ID NO: 1694 - DNA, 20 bp, Artificial Sequence
  EGFR Reverse Primer
tcatcccacttgcaaatcaa

SEQ ID NO: 1695 - DNA, 23 bp, Artificial Sequence
  EGFR Reverse Primer
tccctgttcctaacacctaaaaa

SEQ ID NO: 1696 - DNA, 20 bp, Artificial Sequence
  EGFR Reverse Primer
accacactcggccattttta

SEQ ID NO: 1697 - DNA, 20 bp, Artificial Sequence
  EGFR Reverse Primer
tggatctccccatctctgtc

SEQ ID NO: 1698 - DNA, 20 bp, Artificial Sequence
  EGFR Reverse Primer
tccgtcgagaagctgaattt

SEQ ID NO: 1699 - DNA, 21 bp, Artificial Sequence
  EGFR Reverse Primer
tgcctgttaagagaggaggtg

SEQ ID NO: 1700 - DNA, 20 bp, Artificial Sequence
  EGFR Reverse Primer
gatcagggctcagaatgctc

SEQ ID NO: 1701 - DNA, 20 bp, Artificial Sequence
  EGFR Reverse Primer
ggggatctggattacaggct

SEQ ID NO: 1702 - DNA, 20 bp, Artificial Sequence
  EGFR Reverse Primer
atttggtcttccgtgagcat

SEQ ID NO: 1703 - DNA, 20 bp, Artificial Sequence
  EGFR Reverse Primer
aactggaaatgctggagtgg

SEQ ID NO: 1704 - DNA, 20 bp, Artificial Sequence
  EGFR Reverse Primer
accacctcactggtgtcctc

SEQ ID NO: 1705 - DNA, 20 bp, Artificial Sequence
  EGFR Reverse Primer
ccacccctgcctattaacct

SEQ ID NO: 1706 - DNA, 20 bp, Artificial Sequence
  EGFR Reverse Primer
tatgggcgttaaaggtcctg

SEQ ID NO: 1707 - DNA, 20 bp, Artificial Sequence
  EGFR Reverse Primer
gtgacagcccaggaaaatgt

SEQ ID NO: 1708 - DNA, 20 bp, Artificial Sequence
  EGFR Reverse Primer
tcctaatccacagcaaagca

SEQ ID NO: 1709 - DNA, 20 bp, Artificial Sequence
  EGFR Reverse Primer
caaccccaccttcctcctat

SEQ ID NO: 1710 - DNA, 20 bp, Artificial Sequence
  EGFR Reverse Primer
gcaagaaaagtctttcccca

SEQ ID NO: 1711 - DNA, 24 bp, Artificial Sequence
  EGFR Reverse Primer
gatgtagatgcagtagctttcacc

SEQ ID NO: 1712 - DNA, 22 bp, Artificial Sequence
  EGFR Reverse Primer
caaaaggccaatgagaaaactt

SEQ ID NO: 1713 - DNA, 20 bp, Artificial Sequence
  EGFR Reverse Primer
ctggtgaatgctgcagaaaa

SEQ ID NO: 1714 - DNA, 21 bp, Artificial Sequence
  EGFR Reverse Primer
tcttgtccgtgaaattccatt

SEQ ID NO: 1715 - DNA, 20 bp, Artificial Sequence
  EGFR Reverse Primer
aaatcacctggttggtgagc

SEQ ID NO: 1716 - DNA, 20 bp, Artificial Sequence
  EGFR Reverse Primer
cattgagagcagtgccttga

SEQ ID NO: 1717 - DNA, 20 bp, Artificial Sequence
  EGFR Reverse Primer
aacaagctgaggcaggtgag

SEQ ID NO: 1718 - DNA, 20 bp, Artificial Sequence
  EGFR Reverse Primer
ctccatgacaaagctgggtt

SEQ ID NO: 1719 - DNA, 20 bp, Artificial Sequence
  EGFR Reverse Primer
ggactctggtaactcgctcg

SEQ ID NO: 1720 - DNA, 20 bp, Artificial Sequence
  EGFR Reverse Primer
tctgcatcaggactttcacg

SEQ ID NO: 1721 - DNA, 22 bp, Artificial Sequence
  EGFR Reverse Primer
aggagcaactgcattacagaca

SEQ ID NO: 1722 - DNA, 20 bp, Artificial Sequence
  EGFR Reverse Primer
ccactcaatcacacagccac

SEQ ID NO: 1723 - DNA, 20 bp, Artificial Sequence
  EGFR Reverse Primer
aacaccgaacagccaacaat

SEQ ID NO: 1724 - DNA, 20 bp, Artificial Sequence
  EGFR Reverse Primer
cagcccatacacaaggtcag

SEQ ID NO: 1725 - DNA, 20 bp, Artificial Sequence
  EGFR Reverse Primer
acagggctctgtattgcagg

SEQ ID NO: 1726 - DNA, 23 bp, Artificial Sequence
  EGFR Reverse Primer
cccagagctatctcctcttcttt

SEQ ID NO: 1727 - DNA, 20 bp, Artificial Sequence
  EGFR Reverse Primer
gcagcaggccagatcaagta

SEQ ID NO: 1728 - DNA, 20 bp, Artificial Sequence
  EGFR Reverse Primer
ggaaggccctatcagggtaa

SEQ ID NO: 1729 - DNA, 20 bp, Artificial Sequence
  EGFR Reverse Primer
gccatcaacactcacatgct

SEQ ID NO: 1730 - DNA, 20 bp, Artificial Sequence
  EGFR Reverse Primer
ttgcatcagcaaaatcgaag

SEQ ID NO: 1731 - DNA, 20 bp, Artificial Sequence
  EGFR Reverse Primer
gcctaaccctttcactgctg

SEQ ID NO: 1732 - DNA, 20 bp, Artificial Sequence
  EGFR Reverse Primer
tcctctgatcttggggacac

SEQ ID NO: 1733 - DNA, 20 bp, Artificial Sequence
  EGFR Reverse Primer
caccaggacagttgggatct

SEQ ID NO: 1734 - DNA, 20 bp, Artificial Sequence
  EGFR Reverse Primer
ccttaccaacagctctccca

SEQ ID NO: 1735 - DNA, 20 bp, Artificial Sequence
  EGFR Reverse Primer
ggtgaaggaagcgaagaaga

SEQ ID NO: 1736 - DNA, 20 bp, Artificial Sequence
  EGFR Reverse Primer
atgtgtgtctcatgcaaggc

SEQ ID NO: 1737 - DNA, 20 bp, Artificial Sequence
  EGFR Reverse Primer
ttagtgtgccttcagcagga

SEQ ID NO: 1738 - DNA, 20 bp, Artificial Sequence
  EGFR Reverse Primer
agaacggctccttcaccttt

SEQ ID NO: 1739 - DNA, 20 bp, Artificial Sequence
  EGFR Reverse Primer
tgaagcacgtcaagaaacca

SEQ ID NO: 1740 - DNA, 20 bp, Artificial Sequence
  EGFR Reverse Primer
gtgtcctcctggtccacagt

SEQ ID NO: 1741 - DNA, 20 bp, Artificial Sequence
  EGFR Reverse Primer
gcgaagcagattggctaaga

SEQ ID NO: 1742 - DNA, 20 bp, Artificial Sequence
  EGFR Reverse Primer
agaccattaggcagggcttt

SEQ ID NO: 1743 - DNA, 20 bp, Artificial Sequence
  EGFR Reverse Primer
gccaggaaaaagtggcatta

SEQ ID NO: 1744 - DNA, 20 bp, Artificial Sequence
  EGFR Reverse Primer
atgtgagtggtgtgaacgga

SEQ ID NO: 1745 - DNA, 20 bp, Artificial Sequence
  EGFR Reverse Primer
tggctccagatgtgtgactc

SEQ ID NO: 1746 - DNA, 20 bp, Artificial Sequence
  EGFR Reverse Primer
aagggtcccaggtgattctc

SEQ ID NO: 1747 - DNA, 20 bp, Artificial Sequence
  EGFR Reverse Primer
ctgcagggaaagaggatgag

SEQ ID NO: 1748 - DNA, 20 bp, Artificial Sequence
  EGFR Reverse Primer
tggtgaagtgttgtggaacg

SEQ ID NO: 1749 - DNA, 20 bp, Artificial Sequence
  EGFR Reverse Primer
tctttcatgttccagatgcg

SEQ ID NO: 1750 - DNA, 20 bp, Artificial Sequence
  EGFR Reverse Primer
atatgtgaaatgggaaccgc

SEQ ID NO: 1751 - DNA, 20 bp, Artificial Sequence
  EGFR Reverse Primer
gcgtttttcattccgtcagt

SEQ ID NO: 1752 - DNA, 20 bp, Artificial Sequence
  EGFR Reverse Primer
tgactctctgctctgttggc

SEQ ID NO: 1753 - DNA, 20 bp, Artificial Sequence
  EGFR Reverse Primer
gtgtcagggaagtccacgtt

SEQ ID NO: 1754 - DNA, 20 bp, Artificial Sequence
  EGFR Reverse Primer
aaaacaaggaaagaggctgg

SEQ ID NO: 1755 - DNA, 20 bp, Artificial Sequence
  EGFR Reverse Primer
agcacgttgcttttgtgaga

SEQ ID NO: 1756 - DNA, 21 bp, Artificial Sequence
  EGFR Reverse Primer
aacgcataagaaatcctgcaa

SEQ ID NO: 1757 - DNA, 20 bp, Artificial Sequence
  EGFR Reverse Primer
tgggaaaggtcagaaaatgc

SEQ ID NO: 1758 - DNA, 21 bp, Artificial Sequence
  EGFR Reverse Primer
tttggccatactgaagaagga

SEQ ID NO: 1759 - DNA, 20 bp, Artificial Sequence
  EGFR Reverse Primer
tggccatgtccaagtaacaa

SEQ ID NO: 1760 - DNA, 20 bp, Artificial Sequence
  EGFR Reverse Primer
aattgctttccttctcgtgg

SEQ ID NO: 1761 - DNA, 20 bp, Artificial Sequence
  EGFR Reverse Primer
tcacacagcaaatgtggctt

SEQ ID NO: 1762 - DNA, 20 bp, Artificial Sequence
  EGFR Reverse Primer
atctcctggggatcgagttc

SEQ ID NO: 1763 - DNA, 20 bp, Artificial Sequence
  EGFR Reverse Primer
tctatgcctccaaagccaac

SEQ ID NO: 1764 - DNA, 20 bp, Artificial Sequence
  EGFR Reverse Primer
aaacccatgcacatttttcc

SEQ ID NO: 1765 - DNA, 20 bp, Artificial Sequence
  EGFR Reverse Primer
ctcgaaagccaatttcaagc

SEQ ID NO: 1766 - DNA, 20 bp, Artificial Sequence
  EGFR Reverse Primer
cagcacatgtggttcgatct

SEQ ID NO: 1767 - DNA, 20 bp, Artificial Sequence
  EGFR Reverse Primer
ctgcctcctttctgaacagc

SEQ ID NO: 1768 - DNA, 21 bp, Artificial Sequence
  EGFR Reverse Primer
tccatggaagacttaacgtgc

SEQ ID NO: 1769 - DNA, 20 bp, Artificial Sequence
  EGFR Reverse Primer
agtggggaagaacacgacac

SEQ ID NO: 1770 - DNA, 20 bp, Artificial Sequence
  EGFR Reverse Primer
ttgcatgaatgggtgtttgt

SEQ ID NO: 1771 - DNA, 21 bp, Artificial Sequence
  EGFR Reverse Primer
aaacagaaatgatggagccag

SEQ ID NO: 1772 - DNA, 20 bp, Artificial Sequence
  EGFR Reverse Primer
tggggaggaatcttcatctg

SEQ ID NO: 1773 - DNA, 24 bp, Artificial Sequence
  EGFR Reverse Primer
caaattagaggcttttgaaagtgc

SEQ ID NO: 1774 - DNA, 20 bp, Artificial Sequence
  EGFR Reverse Primer
tttctctggggaaacacagc

SEQ ID NO: 1775 - DNA, 20 bp, Artificial Sequence
  EGFR Reverse Primer
aggggactctgtcacacacc

SEQ ID NO: 1776 - DNA, 20 bp, Artificial Sequence
  EGFR Reverse Primer
ggggaacatttcacaccaaa

SEQ ID NO: 1777 - DNA, 20 bp, Artificial Sequence
  EGFR Reverse Primer
cagaggcttgacctgaggag

SEQ ID NO: 1778 - DNA, 20 bp, Artificial Sequence
  EGFR Reverse Primer
ctacctccctcaccctgaca

SEQ ID NO: 1779 - DNA, 20 bp, Artificial Sequence
  EGFR Reverse Primer
ttttccaacagatgccttcc

SEQ ID NO: 1780 - DNA, 20 bp, Artificial Sequence
  EGFR Reverse Primer
taaaaaggagtgtggggctg

SEQ ID NO: 1781 - DNA, 20 bp, Artificial Sequence
  EGFR Reverse Primer
tggacagactattgcctccc

SEQ ID NO: 1782 - DNA, 22 bp, Artificial Sequence
  EGFR Reverse Primer
tgaagaaatggttgcaaaaaga

SEQ ID NO: 1783 - DNA, 20 bp, Artificial Sequence
  EGFR Reverse Primer
aagggccacctcgataaaat

SEQ ID NO: 1784 - DNA, 20 bp, Artificial Sequence
  EGFR Reverse Primer
taggaggtcaccaatcctgg

SEQ ID NO: 1785 - DNA, 20 bp, Artificial Sequence
  EGFR Reverse Primer
tttcttagatgcagcctggg

SEQ ID NO: 1786 - DNA, 20 bp, Artificial Sequence
  EGFR Reverse Primer
tggttcttttcccaccgtag

SEQ ID NO: 1787 - DNA, 20 bp, Artificial Sequence
  EGFR Reverse Primer
gcaagaaacgaggaaatcca

SEQ ID NO: 1788 - DNA, 20 bp, Artificial Sequence
  EGFR Reverse Primer
ccaaccctccaaattccttt

SEQ ID NO: 1789 - DNA, 20 bp, Artificial Sequence
  EGFR Reverse Primer
ctggtctggtccctgtgttt

SEQ ID NO: 1790 - DNA, 22 bp, Artificial Sequence
  EGFR Reverse Primer
tggaacatctttgtatatgccc

SEQ ID NO: 1791 - DNA, 20 bp, Artificial Sequence
  EGFR Reverse Primer
cctgcaggtcacatacgaaa

SEQ ID NO: 1792 - DNA, 20 bp, Artificial Sequence
  EGFR Reverse Primer
tctgaggaaagcactgctga

SEQ ID NO: 1793 - DNA, 20 bp, Artificial Sequence
  EGFR Reverse Primer
agcaactgcttgtgctacga

SEQ ID NO: 1794 - DNA, 20 bp, Artificial Sequence
  EGFR Reverse Primer
agcctccaagagcagtcaga

SEQ ID NO: 1795 - DNA, 20 bp, Artificial Sequence
  EGFR Reverse Primer
tcacccacatactgcctgaa

SEQ ID NO: 1796 - DNA, 20 bp, Artificial Sequence
  EGFR Reverse Primer
acagggtgcaaaagaacagg

SEQ ID NO: 1797 - DNA, 20 bp, Artificial Sequence
  EGFR Reverse Primer
ctaggggaagggtgtgtctg

SEQ ID NO: 1798 - DNA, 20 bp, Artificial Sequence
  EGFR Reverse Primer
tatgttcacaaaccaggcca

SEQ ID NO: 1799 - DNA, 24 bp, Artificial Sequence
  EGFR Reverse Primer
ggaaaaataatcttgtctttgcca

SEQ ID NO: 1800 - DNA, 20 bp, Artificial Sequence
  EGFR Reverse Primer
acacaccctttggccttcta

SEQ ID NO: 1801 - DNA, 20 bp, Artificial Sequence
  EGFR Reverse Primer
ttgctaagtccattccccag

SEQ ID NO: 1802 - DNA, 20 bp, Artificial Sequence
  EGFR Reverse Primer
tgaaagccagcccatctaat

SEQ ID NO: 1803 - DNA, 20 bp, Artificial Sequence
  EGFR Reverse Primer
catgcagcttggatttcgta

SEQ ID NO: 1804 - DNA, 20 bp, Artificial Sequence
  EGFR Reverse Primer
gcttggctacttttggttgg

SEQ ID NO: 1805 - DNA, 18 bp, Artificial Sequence
  EGFR Reverse Primer
taagcgggtggtcagagc

SEQ ID NO: 1806 - DNA, 20 bp, Artificial Sequence
  EGFR Reverse Primer
catctttggaatctttgggg

SEQ ID NO: 1807 - DNA, 23 bp, Artificial Sequence
  EGFR Reverse Primer
ggaggacacatttttacttccaa

SEQ ID NO: 1808 - DNA, 20 bp, Artificial Sequence
  EGFR Reverse Primer
ttccatgagagcctggagtt

SEQ ID NO: 1809 - DNA, 20 bp, Artificial Sequence
  EGFR Reverse Primer
caaataccccaggacaggaa

SEQ ID NO: 1810 - DNA, 20 bp, Artificial Sequence
  EGFR Reverse Primer
tgtctctacgtggcgtggta

SEQ ID NO: 1811 - DNA, 20 bp, Artificial Sequence
  EGFR Reverse Primer
cacagcgtccactctctcac

SEQ ID NO: 1812 - DNA, 20 bp, Artificial Sequence
  EGFR Reverse Primer
gtggggaaagaggtctggag

SEQ ID NO: 1813 - DNA, 20 bp, Artificial Sequence
  EGFR Reverse Primer
tctcaccacaccttcagcac

SEQ ID NO: 1814 - DNA, 20 bp, Artificial Sequence
  EGFR Reverse Primer
gggcttgtttccttcctttc

SEQ ID NO: 1815 - DNA, 20 bp, Artificial Sequence
  EGFR Reverse Primer
ttctgatctgcaaggaaccc

SEQ ID NO: 1816 - DNA, 20 bp, Artificial Sequence
  EGFR Reverse Primer
agtctgcaacactcattgcg

SEQ ID NO: 1817 - DNA, 20 bp, Artificial Sequence
  EGFR Reverse Primer
atgaattgtgcagtgatggc

SEQ ID NO: 1818 - DNA, 20 bp, Artificial Sequence
  EGFR Reverse Primer
gggtcacaaccagcataaca

SEQ ID NO: 1819 - DNA, 20 bp, Artificial Sequence
  EGFR Reverse Primer
ggcatgtaggattgtgcatc

SEQ ID NO: 1820 - DNA, 20 bp, Artificial Sequence
  EGFR Reverse Primer
ctgtcctgctttctcccttg

SEQ ID NO: 1821 - DNA, 20 bp, Artificial Sequence
  EGFR Reverse Primer
gcttcttaagccatggcaag

SEQ ID NO: 1822 - DNA, 20 bp, Artificial Sequence
  EGFR Reverse Primer
tgacgtcaggcgtctgttac

SEQ ID NO: 1823 - DNA, 21 bp, Artificial Sequence
  EGFR Reverse Primer
ttcaggaagaaaaagattcgc

SEQ ID NO: 1824 - DNA, 20 bp, Artificial Sequence
  EGFR Reverse Primer
ccacctttcttccactcagg

SEQ ID NO: 1825 - DNA, 20 bp, Artificial Sequence
  EGFR Reverse Primer
cattcctcccaagtgtagcc

SEQ ID NO: 1826 - DNA, 20 bp, Artificial Sequence
  EGFR Reverse Primer
ggaagggaaggagaatttgc

SEQ ID NO: 1827 - DNA, 20 bp, Artificial Sequence
  EGFR Reverse Primer
ggagccacatggaggtttta

SEQ ID NO: 1828 - DNA, 20 bp, Artificial Sequence
  EGFR Reverse Primer
ttccaccacgcactactgac

SEQ ID NO: 1829 - DNA, 20 bp, Artificial Sequence
  EGFR Reverse Primer
tgctcaggagacaaaacacg

SEQ ID NO: 1830 - DNA, 20 bp, Artificial Sequence
  EGFR Reverse Primer
ctcggcagtaacatggaggt

SEQ ID NO: 1831 - DNA, 20 bp, Artificial Sequence
  EGFR Reverse Primer
aggcaaaagaagccacagag

SEQ ID NO: 1832 - DNA, 20 bp, Artificial Sequence
  EGFR Reverse Primer
acttctcatttcctgcctgc

SEQ ID NO: 1833 - DNA, 20 bp, Artificial Sequence
  EGFR Reverse Primer
aagtgccactgctgatgttg

SEQ ID NO: 1834 - DNA, 20 bp, Artificial Sequence
  EGFR Reverse Primer
atgtgcaagaaaatgccgac

SEQ ID NO: 1835 - DNA, 20 bp, Artificial Sequence
  EGFR Reverse Primer
agaagaggagaggacgaggg

SEQ ID NO: 1836 - DNA, 20 bp, Artificial Sequence
  EGFR Reverse Primer
aacatggaggtactggacgc

SEQ ID NO: 1837 - DNA, 20 bp, Artificial Sequence
  EGFR Reverse Primer
atcacagggaaagccaaatg

SEQ ID NO: 1838 - DNA, 21 bp, Artificial Sequence
  EGFR Reverse Primer
gagtgaaagcatggttcttgc

SEQ ID NO: 1839 - DNA, 20 bp, Artificial Sequence
  EGFR Reverse Primer
gcaaagcccagaacaagcta

SEQ ID NO: 1840 - DNA, 20 bp, Artificial Sequence
  EGFR Reverse Primer
ggatgagacatgactggcct

SEQ ID NO: 1841 - DNA, 20 bp, Artificial Sequence
  EGFR Reverse Primer
gaaagagggcatcctgcata

SEQ ID NO: 1842 - DNA, 20 bp, Artificial Sequence
  EGFR Reverse Primer
ttcatgtggcagcaaaagac

SEQ ID NO: 1843 - DNA, 20 bp, Artificial Sequence
  EGFR Reverse Primer
tggcatctcaggctgtatgt

SEQ ID NO: 1844 - DNA, 20 bp, Artificial Sequence
  EGFR Reverse Primer
acttgccaactcagcgatct

SEQ ID NO: 1845 - DNA, 20 bp, Artificial Sequence
  EGFR Reverse Primer
tccctggctggttacaaatc

SEQ ID NO: 1846 - DNA, 20 bp, Artificial Sequence
  EGFR Reverse Primer
tatcctgccagcaacacaag

SEQ ID NO: 1847 - DNA, 20 bp, Artificial Sequence
  EGFR Reverse Primer
catcctctagggcactcctg

SEQ ID NO: 1848 - DNA, 20 bp, Artificial Sequence
  EGFR Reverse Primer
tttgatctggcggagaagat

SEQ ID NO: 1849 - DNA, 20 bp, Artificial Sequence
  EGFR Reverse Primer
agggcaatctaggaagaggc

SEQ ID NO: 1850 - DNA, 21 bp, Artificial Sequence
  EGFR Reverse Primer
tcaaacacggaaatcagaaca

SEQ ID NO: 1851 - DNA, 20 bp, Artificial Sequence
  EGFR Reverse Primer
gtcgggagaaggtcctcatt

SEQ ID NO: 1852 - DNA, 23 bp, Artificial Sequence
  EGFR Reverse Primer
tcacagactagtttcatctccct

SEQ ID NO: 1853 - DNA, 20 bp, Artificial Sequence
  EGFR Reverse Primer
tgagttctcagtggctgcac

SEQ ID NO: 1854 - DNA, 20 bp, Artificial Sequence
  EGFR Reverse Primer
ataggccagtctccccagat

SEQ ID NO: 1855 - DNA, 22 bp, Artificial Sequence
  EGFR Reverse Primer
tccagcatatgtgaaaggagaa

SEQ ID NO: 1856 - DNA, 20 bp, Artificial Sequence
  EGFR Reverse Primer
caaggtccaaaatggtccaa

SEQ ID NO: 1857 - DNA, 20 bp, Artificial Sequence
  EGFR Reverse Primer
ctgcagcttttccagctttt

SEQ ID NO: 1858 - DNA, 20 bp, Artificial Sequence
  EGFR Reverse Primer
tgcatgcaatcctttgagtc

SEQ ID NO: 1859 - DNA, 20 bp, Artificial Sequence
  EGFR Reverse Primer
gggaatgaggtagaaagggc

SEQ ID NO: 1860 - DNA, 20 bp, Artificial Sequence
  EGFR Reverse Primer
cccatcgcctgatgttattt

SEQ ID NO: 1861 - DNA, 20 bp, Artificial Sequence
  EGFR Reverse Primer
atagaacctcggctgcacct

SEQ ID NO: 1862 - DNA, 20 bp, Artificial Sequence
  EGFR Reverse Primer
ggcaaggaggatagaggagg

SEQ ID NO: 1863 - DNA, 20 bp, Artificial Sequence
  EGFR Reverse Primer
ggggcttcagtattattggc

SEQ ID NO: 1864 - DNA, 20 bp, Artificial Sequence
  EGFR Reverse Primer
gctccatggcaatctgtctt

SEQ ID NO: 1865 - DNA, 21 bp, Artificial Sequence
  EGFR Reverse Primer
gcaactctggggtctgtatga

SEQ ID NO: 1866 - DNA, 20 bp, Artificial Sequence
  EGFR Reverse Primer
gtcagaccaccctcaggaga

SEQ ID NO: 1867 - DNA, 26 bp, Artificial Sequence
  EGFR Reverse Primer
tttttatgcatacgtagtaaacaggt

SEQ ID NO: 1868 - DNA, 21 bp, Artificial Sequence
  EGFR Reverse Primer
gctcacagacaacactggaca

SEQ ID NO: 1869 - DNA, 20 bp, Artificial Sequence
  EGFR Reverse Primer
agagcacacagagggctgtt

SEQ ID NO: 1870 - DNA, 22 bp, Artificial Sequence
  EGFR Reverse Primer
aaactcacccatctcatggtct

SEQ ID NO: 1871 - DNA, 20 bp, Artificial Sequence
  EGFR Reverse Primer
aacccctcggtgtctcttct

SEQ ID NO: 1872 - DNA, 20 bp, Artificial Sequence
  EGFR Reverse Primer
cacatttgatgcatcggttc

SEQ ID NO: 1873 - DNA, 20 bp, Artificial Sequence
  EGFR Reverse Primer
gcactgtcaggcatcgtaga

SEQ ID NO: 1874 - DNA, 20 bp, Artificial Sequence
  EGFR Reverse Primer
aagtggaggtcccctttcaa

SEQ ID NO: 1875 - DNA, 20 bp, Artificial Sequence
  EGFR Reverse Primer
ggtggaaaagcaccaggtaa

SEQ ID NO: 1876 - DNA, 20 bp, Artificial Sequence
  EGFR Reverse Primer
aagctggaaggaagtgctga

SEQ ID NO: 1877 - DNA, 20 bp, Artificial Sequence
  EGFR Reverse Primer
ggctggctgataggatttca

SEQ ID NO: 1878 - DNA, 20 bp, Artificial Sequence
  EGFR Reverse Primer
cctccgttgctcaaccttag

SEQ ID NO: 1879 - DNA, 20 bp, Artificial Sequence
  EGFR Reverse Primer
gtgggtcacataagtgggct

SEQ ID NO: 1880 - DNA, 20 bp, Artificial Sequence
  EGFR Reverse Primer
agtccttcacctggagagca

SEQ ID NO: 1881 - DNA, 20 bp, Artificial Sequence
  EGFR Reverse Primer
tgtgcctcctgagaatgttt

SEQ ID NO: 1882 - DNA, 20 bp, Artificial Sequence
  EGFR Reverse Primer
gcagagactgggaaaggtca

SEQ ID NO: 1883 - DNA, 20 bp, Artificial Sequence
  EGFR Reverse Primer
gcaatgctgcaggttcataa

SEQ ID NO: 1884 - DNA, 20 bp, Artificial Sequence
  EGFR Reverse Primer
gagccttctatgcagcatcc

SEQ ID NO: 1885 - DNA, 20 bp, Artificial Sequence
  EGFR Reverse Primer
atcctactcagtgctgccca

SEQ ID NO: 1886 - DNA, 20 bp, Artificial Sequence
  EGFR Reverse Primer
tcatccagcacagtagcagc

SEQ ID NO: 1887 - DNA, 20 bp, Artificial Sequence
  EGFR Reverse Primer
cctcttacagtgggttggga

SEQ ID NO: 1888 - DNA, 20 bp, Artificial Sequence
  EGFR Reverse Primer
atgtaacaaccgcaagctcc

SEQ ID NO: 1889 - DNA, 23 bp, Artificial Sequence
  EGFR Reverse Primer
tgagaataaaaagcaacagcaaa

SEQ ID NO: 1890 - DNA, 20 bp, Artificial Sequence
  EGFR Reverse Primer
aatgcttctccagttgtgcc

SEQ ID NO: 1891 - DNA, 27 bp, Artificial Sequence
  EGFR Reverse Primer
aaaagcttatcaaatagaacatttgtc

SEQ ID NO: 1892 - DNA, 20 bp, Artificial Sequence
  EGFR Reverse Primer
tgctgggtttttggaatagc

SEQ ID NO: 1893 - DNA, 20 bp, Artificial Sequence
  EGFR Reverse Primer
gccacagaatgaagggaaaa

SEQ ID NO: 1894 - DNA, 22 bp, Artificial Sequence
  EGFR Reverse Primer
ttttacaatgcagctttgagga

SEQ ID NO: 1895 - DNA, 21 bp, Artificial Sequence
  EGFR Reverse Primer
tttatgggcaaaacaaactga

SEQ ID NO: 1896 - DNA, 20 bp, Artificial Sequence
  EGFR Reverse Primer
tcgagtgatcgttttgcttg

SEQ ID NO: 1897 - DNA, 20 bp, Artificial Sequence
  EGFR Reverse Primer
gcagcatccactcttcacaa

SEQ ID NO: 1898 - DNA, 20 bp, Artificial Sequence
  EGFR Reverse Primer
gcatccaataggagccagaa

SEQ ID NO: 1899 - DNA, 20 bp, Artificial Sequence
  EGFR Reverse Primer
agtcactctcggacccctct

SEQ ID NO: 1900 - DNA, 20 bp, Artificial Sequence
  EGFR Reverse Primer
agtgttcatgaattccaggc

SEQ ID NO: 1901 - DNA, 20 bp, Artificial Sequence
  EGFR Reverse Primer
tcaaactttggccctgtttc

SEQ ID NO: 1902 - DNA, 19 bp, Artificial Sequence
  EGFR Reverse Primer
ctgtccctcccaccttctc

SEQ ID NO: 1903 - DNA, 20 bp, Artificial Sequence
  EGFR Reverse Primer
tgcttgggaagaagatgagg

SEQ ID NO: 1904 - DNA, 20 bp, Artificial Sequence
  EGFR Reverse Primer
ttgtcttgctttctgcttgg

SEQ ID NO: 1905 - DNA, 20 bp, Artificial Sequence
  EGFR Reverse Primer
ttgctgaaacaccagacagg

SEQ ID NO: 1906 - DNA, 20 bp, Artificial Sequence
  EGFR Reverse Primer
tccccagcagtatctcatca

SEQ ID NO: 1907 - DNA, 20 bp, Artificial Sequence
  EGFR Reverse Primer
atccatgtctgcagagaccc

SEQ ID NO: 1908 - DNA, 20 bp, Artificial Sequence
  EGFR Reverse Primer
ggatccgaacaggaaacaga

SEQ ID NO: 1909 - DNA, 20 bp, Artificial Sequence
  EGFR Reverse Primer
aaacccccaaaactccattc

SEQ ID NO: 1910 - DNA, 20 bp, Artificial Sequence
  EGFR Reverse Primer
tggctgattgagccctaaac

SEQ ID NO: 1911 - DNA, 19 bp, Artificial Sequence
  EGFR Reverse Primer
actgagcccactcactccc

SEQ ID NO: 1912 - DNA, 20 bp, Artificial Sequence
  EGFR Reverse Primer
gcctggcacacagtgatgta

SEQ ID NO: 1913 - DNA, 20 bp, Artificial Sequence
  EGFR Reverse Primer
gtcacaatgagacccgaagg

SEQ ID NO: 1914 - DNA, 20 bp, Artificial Sequence
  EGFR Reverse Primer
gaaagtgaccaccccagcta

SEQ ID NO: 1915 - DNA, 20 bp, Artificial Sequence
  EGFR Reverse Primer
ccatccagcgtttcctactt

SEQ ID NO: 1916 - DNA, 20 bp, Artificial Sequence
  EGFR Reverse Primer
aagtgtccttgtgtggaggg

SEQ ID NO: 1917 - DNA, 20 bp, Artificial Sequence
  EGFR Reverse Primer
aaaaccaccatcctgcaaac

SEQ ID NO: 1918 - DNA, 20 bp, Artificial Sequence
  EGFR Reverse Primer
tgtgcactcatagggcaaga

SEQ ID NO: 1919 - DNA, 20 bp, Artificial Sequence
  EGFR Reverse Primer
gaacacaggaaggaacctgg

SEQ ID NO: 1920 - DNA, 23 bp, Artificial Sequence
  EGFR Reverse Primer
aacgaactcatgaaaatagcagc

SEQ ID NO: 1921 - DNA, 20 bp, Artificial Sequence
  EGFR Reverse Primer
tgcctgctactgtatgacgg

SEQ ID NO: 1922 - DNA, 20 bp, Artificial Sequence
  EGFR Reverse Primer
catgttgtgccccattctaa

SEQ ID NO: 1923 - DNA, 20 bp, Artificial Sequence
  EGFR Reverse Primer
tggtgcaactggatttcttg

SEQ ID NO: 1924 - DNA, 20 bp, Artificial Sequence
  EGFR Reverse Primer
tagaatggacgaacgcagtg

SEQ ID NO: 1925 - DNA, 20 bp, Artificial Sequence
  EGFR Reverse Primer
gtatgtggcaatctttgggg

SEQ ID NO: 1926 - DNA, 20 bp, Artificial Sequence
  EGFR Reverse Primer
agagccgttcctctttgaca

SEQ ID NO: 1927 - DNA, 20 bp, Artificial Sequence
  EGFR Reverse Primer
ttccttgctccttcgttgag

SEQ ID NO: 1928 - DNA, 20 bp, Artificial Sequence
  EGFR Reverse Primer
ttctgcacaggtgcatgtct

SEQ ID NO: 1929 - DNA, 20 bp, Artificial Sequence
  EGFR Reverse Primer
tcagaagcactggcaaaatg

SEQ ID NO: 1930 - DNA, 20 bp, Artificial Sequence
  EGFR Reverse Primer
aagatttgggggagcatttc

SEQ ID NO: 1931 - DNA, 20 bp, Artificial Sequence
  EGFR Reverse Primer
gccaggataaattgaatggc

SEQ ID NO: 1932 - DNA, 20 bp, Artificial Sequence
  EGFR Reverse Primer
atgtttctggaaccactcgg

SEQ ID NO: 1933 - DNA, 20 bp, Artificial Sequence
  EGFR Reverse Primer
acctgctgcaacagaatgtg

SEQ ID NO: 1934 - DNA, 20 bp, Artificial Sequence
  EGFR Reverse Primer
cacagggtaccaggaagtgg

SEQ ID NO: 1935 - DNA, 20 bp, Artificial Sequence
  EGFR Reverse Primer
atgtgtcaacaacgttccca

SEQ ID NO: 1936 - DNA, 20 bp, Artificial Sequence
  EGFR Reverse Primer
aggcaattcactctaccgga

SEQ ID NO: 1937 - DNA, 20 bp, Artificial Sequence
  EGFR Reverse Primer
gggctttctgaagaggacag

SEQ ID NO: 1938 - DNA, 20 bp, Artificial Sequence
  EGFR Reverse Primer
ctcgaagggcagtacctcac

SEQ ID NO: 1939 - DNA, 22 bp, Artificial Sequence
  EGFR Reverse Primer
ggaagttacccaagaaagctca

SEQ ID NO: 1940 - DNA, 21 bp, Artificial Sequence
  EGFR Reverse Primer
ccctaatgcggattaaagaga

SEQ ID NO: 1941 - DNA, 20 bp, Artificial Sequence
  EGFR Reverse Primer
gagagtgctgggaagacagc

SEQ ID NO: 1942 - DNA, 20 bp, Artificial Sequence
  EGFR Reverse Primer
agcaggaggagtcagcacat

SEQ ID NO: 1943 - DNA, 20 bp, Artificial Sequence
  EGFR Reverse Primer
gtcagccactaccccacatt

SEQ ID NO: 1944 - DNA, 20 bp, Artificial Sequence
  EGFR Reverse Primer
ttcccccagacgtgatattt

SEQ ID NO: 1945 - DNA, 22 bp, Artificial Sequence
  EGFR Reverse Primer
caaaaaggaagaccagaaagga

SEQ ID NO: 1946 - DNA, 22 bp, Artificial Sequence
  EGFR Reverse Primer
ttctgacaatagcactgggaaa

SEQ ID NO: 1947 - DNA, 20 bp, Artificial Sequence
  EGFR Reverse Primer
ttggatcagttatgccccat

SEQ ID NO: 1948 - DNA, 20 bp, Artificial Sequence
  EGFR Reverse Primer
atcgggaatgttcgagtgag

SEQ ID NO: 1949 - DNA, 20 bp, Artificial Sequence
  EGFR Reverse Primer
attaggcctccagggagtgt

SEQ ID NO: 1950 - DNA, 20 bp, Artificial Sequence
  EGFR Reverse Primer
gtgctgttggaaatgagcct

SEQ ID NO: 1951 - DNA, 20 bp, Artificial Sequence
  EGFR Reverse Primer
gaaaggcactgagaagccac

SEQ ID NO: 1952 - DNA, 20 bp, Artificial Sequence
  EGFR Reverse Primer
ccttcaggaagcagttcagc

SEQ ID NO: 1953 - DNA, 20 bp, Artificial Sequence
  EGFR Reverse Primer
agtggttgctgttgtcatcg

SEQ ID NO: 1954 - DNA, 20 bp, Artificial Sequence
  EGFR Reverse Primer
tcactggtatgtggggatga

SEQ ID NO: 1955 - DNA, 20 bp, Artificial Sequence
  EGFR Reverse Primer
cactcatcccctgacaaaca

SEQ ID NO: 1956 - DNA, 20 bp, Artificial Sequence
  EGFR Reverse Primer
caaaggttgggtagcagagc

SEQ ID NO: 1957 - DNA, 20 bp, Artificial Sequence
  EGFR Reverse Primer
ttttccttgaagccgagaaa

SEQ ID NO: 1958 - DNA, 21 bp, Artificial Sequence
  EGFR Reverse Primer
ccccattcaatctgacagaac

SEQ ID NO: 1959 - DNA, 20 bp, Artificial Sequence
  EGFR Reverse Primer
tagaaatgaaccgcaaaggg

SEQ ID NO: 1960 - DNA, 20 bp, Artificial Sequence
  EGFR Reverse Primer
caggggtgagtcacagaaca

SEQ ID NO: 1961 - DNA, 20 bp, Artificial Sequence
  EGFR Reverse Primer
gctttggtctcccctaggtt

SEQ ID NO: 1962 - DNA, 20 bp, Artificial Sequence
  EGFR Reverse Primer
ttggcttctgtagtccccac

SEQ ID NO: 1963 - DNA, 20 bp, Artificial Sequence
  EGFR Reverse Primer
agctgaaaccagtcccttga

SEQ ID NO: 1964 - DNA, 20 bp, Artificial Sequence
  EGFR Reverse Primer
aggccaaactccaaaaggat

SEQ ID NO: 1965 - DNA, 20 bp, Artificial Sequence
  EGFR Reverse Primer
gggtcgttgacaaggaaaaa

SEQ ID NO: 1966 - DNA, 20 bp, Artificial Sequence
  EGFR Reverse Primer
tggttttgtaagcgtggttg

SEQ ID NO: 1967 - DNA, 20 bp, Artificial Sequence
  EGFR Reverse Primer
ctagaggggttgcacaggag

SEQ ID NO: 1968 - DNA, 20 bp, Artificial Sequence
  EGFR Reverse Primer
cagaacgatgcagccagtag

SEQ ID NO: 1969 - DNA, 20 bp, Artificial Sequence
  EGFR Reverse Primer
agtgaattgaattgctgggg

SEQ ID NO: 1970 - DNA, 20 bp, Artificial Sequence
  EGFR Reverse Primer
caaagacaccaggagcaggt

SEQ ID NO: 1971 - DNA, 20 bp, Artificial Sequence
  EGFR Reverse Primer
gagattttgtttggcttccg

SEQ ID NO: 1972 - DNA, 20 bp, Artificial Sequence
  EGFR Reverse Primer
gtcagctcgagaactgggac

SEQ ID NO: 1973 - DNA, 20 bp, Artificial Sequence
  EGFR Reverse Primer
atggagtcagccacagaggt

SEQ ID NO: 1974 - DNA, 20 bp, Artificial Sequence
  EGFR Reverse Primer
cctcagctttgcatgagaca

SEQ ID NO: 1975 - DNA, 21 bp, Artificial Sequence
  EGFR Reverse Primer
gatgacggagattgcatgatt

SEQ ID NO: 1976 - DNA, 20 bp, Artificial Sequence
  EGFR Reverse Primer
tgcgctgagacttttgctta

SEQ ID NO: 1977 - DNA, 20 bp, Artificial Sequence
  EGFR Reverse Primer
gcttcacatggcagcaacta

SEQ ID NO: 1978 - DNA, 20 bp, Artificial Sequence
  EGFR Reverse Primer
gcttctgatcacaggaaggc

SEQ ID NO: 1979 - DNA, 20 bp, Artificial Sequence
  EGFR Reverse Primer
gcacagctgcaaactcatgt

SEQ ID NO: 1980 - DNA, 22 bp, Artificial Sequence
  EGFR Reverse Primer
aaacttttgtgggatggaaaaa

SEQ ID NO: 1981 - DNA, 20 bp, Artificial Sequence
  EGFR Reverse Primer
ggaagcatgacaggaggaag

SEQ ID NO: 1982 - DNA, 20 bp, Artificial Sequence
  EGFR Reverse Primer
cttgccactttctggttggt

SEQ ID NO: 1983 - DNA, 20 bp, Artificial Sequence
  EGFR Reverse Primer
ataccactctgcccacaagc

SEQ ID NO: 1984 - DNA, 21 bp, Artificial Sequence
  EGFR Reverse Primer
tctgttgttgtgctccacttg

SEQ ID NO: 1985 - DNA, 20 bp, Artificial Sequence
  EGFR Reverse Primer
gtctgcctttggatgcattt

SEQ ID NO: 1986 - DNA, 24 bp, Artificial Sequence
  EGFR Reverse Primer
tcaaaccagaaaagaaagaagaaa

SEQ ID NO: 1987 - DNA, 22 bp, Artificial Sequence
  EGFR Reverse Primer
ggtatgatcttggttccatcct

SEQ ID NO: 1988 - DNA, 21 bp, Artificial Sequence
  EGFR Reverse Primer
gcaaagaaacttaaatgccca

SEQ ID NO: 1989 - DNA, 23 bp, Artificial Sequence
  EGFR Reverse Primer
cccttcattgtctacaattagca

SEQ ID NO: 1990 - DNA, 20 bp, Artificial Sequence
  EGFR Reverse Primer
gccaaacagatgaacagggt

SEQ ID NO: 1991 - DNA, 20 bp, Artificial Sequence
  EGFR Reverse Primer
tgtcggctacacatgcagat

SEQ ID NO: 1992 - DNA, 20 bp, Artificial Sequence
  EGFR Reverse Primer
gtggggatttccctgttctt

SEQ ID NO: 1993 - DNA, 20 bp, Artificial Sequence
  EGFR Reverse Primer
tcttcctcatctgcaaaggc

SEQ ID NO: 1994 - DNA, 20 bp, Artificial Sequence
  EGFR Reverse Primer
atggacgtggtgatccattt

SEQ ID NO: 1995 - DNA, 21 bp, Artificial Sequence
  EGFR Reverse Primer
aaaaacctaactggctggaga

SEQ ID NO: 1996 - DNA, 20 bp, Artificial Sequence
  EGFR Reverse Primer
aaatttaaaggggtgggtgg

SEQ ID NO: 1997 - DNA, 20 bp, Artificial Sequence
  EGFR Reverse Primer
acatcctctggaggctgaga

SEQ ID NO: 1998 - DNA, 20 bp, Artificial Sequence
  EGFR Reverse Primer
tggtcagggataaacgtcag

SEQ ID NO: 1999 - DNA, 20 bp, Artificial Sequence
  EGFR Reverse Primer
acataaccagccacctcctg

SEQ ID NO: 2000 - DNA, 20 bp, Artificial Sequence
  EGFR Reverse Primer
cccgcttaaatcttcccatt

SEQ ID NO: 2001 - DNA, 20 bp, Artificial Sequence
  EGFR Reverse Primer
aatttaacattcctggcccc

SEQ ID NO: 2002 - DNA, 20 bp, Artificial Sequence
  EGFR Reverse Primer
tcacacccctttcctaccag

SEQ ID NO: 2003 - DNA, 20 bp, Artificial Sequence
  EGFR Reverse Primer
gtgaggcgcactgtaggaac

SEQ ID NO: 2004 - DNA, 20 bp, Artificial Sequence
  EGFR Reverse Primer
gcagcaggcactaggttagc

SEQ ID NO: 2005 - DNA, 20 bp, Artificial Sequence
  EGFR Reverse Primer
cttcctgcagacaggagacc

SEQ ID NO: 2006 - DNA, 20 bp, Artificial Sequence
  EGFR Reverse Primer
cagggagaccctgacacagt

SEQ ID NO: 2007 - DNA, 20 bp, Artificial Sequence
  EGFR Reverse Primer
caggcggagcttttcattag

SEQ ID NO: 2008 - DNA, 20 bp, Artificial Sequence
  EGFR Reverse Primer
gcatgtgctcttcgcattta

SEQ ID NO: 2009 - DNA, 20 bp, Artificial Sequence
  EGFR Reverse Primer
cataggagctggaggcagag

SEQ ID NO: 2010 - DNA, 20 bp, Artificial Sequence
  EGFR Reverse Primer
cagcagctcttctcaggaca

SEQ ID NO: 2011 - DNA, 20 bp, Artificial Sequence
  EGFR Reverse Primer
agctgggtgagtgtgagctt

SEQ ID NO: 2012 - DNA, 20 bp, Artificial Sequence
  EGFR Reverse Primer
tgaacctacccatcattccc

SEQ ID NO: 2013 - DNA, 20 bp, Artificial Sequence
  EGFR Reverse Primer
gcattcccaacttgcctcta

SEQ ID NO: 2014 - DNA, 20 bp, Artificial Sequence
  EGFR Reverse Primer
caaggagtgggtgatggatt

SEQ ID NO: 2015 - DNA, 27 bp, Artificial Sequence
  EGFR Reverse Primer
cttttaaagatgacttcacagagtgat

SEQ ID NO: 2016 - DNA, 22 bp, Artificial Sequence
  EGFR Reverse Primer
tccgaaatgtgatattgattgg

SEQ ID NO: 2017 - DNA, 22 bp, Artificial Sequence
  EGFR Reverse Primer
ggaattggaatcccactataca

SEQ ID NO: 2018 - DNA, 20 bp, Artificial Sequence
  EGFR Reverse Primer
gtagcgtgcaatcccattct

SEQ ID NO: 2019 - DNA, 20 bp, Artificial Sequence
  EGFR Reverse Primer
gctgacgattgatctcccat

SEQ ID NO: 2020 - DNA, 20 bp, Artificial Sequence
  EGFR Reverse Primer
gctgcaaaggttttcctgtc

SEQ ID NO: 2021 - DNA, 20 bp, Artificial Sequence
  EGFR Reverse Primer
tctgcttaggcttggagcat

SEQ ID NO: 2022 - DNA, 20 bp, Artificial Sequence
  EGFR Reverse Primer
atgagaaactgatgacgccc

SEQ ID NO: 2023 - DNA, 20 bp, Artificial Sequence
  EGFR Reverse Primer
ccaccctggattaactgcat

SEQ ID NO: 2024 - DNA, 20 bp, Artificial Sequence
  EGFR Reverse Primer
atcttgggcaatgcagaaag

SEQ ID NO: 2025 - DNA, 20 bp, Artificial Sequence
  EGFR Reverse Primer
tcttctgtcctggtgtgggt

SEQ ID NO: 2026 - DNA, 20 bp, Artificial Sequence
  EGFR Reverse Primer
gttctgtgcccaggtcctaa

SEQ ID NO: 2027 - DNA, 21 bp, Artificial Sequence
  EGFR Reverse Primer
ggcgacagtgagtacttcagg

SEQ ID NO: 2028 - DNA, 20 bp, Artificial Sequence
  EGFR Reverse Primer
cctggggctcacattagaaa

SEQ ID NO: 2029 - DNA, 20 bp, Artificial Sequence
  EGFR Reverse Primer
ggtgcactgtcccacctatc

SEQ ID NO: 2030 - DNA, 20 bp, Artificial Sequence
  EGFR Reverse Primer
ggtggcaccaaagctgtatt

SEQ ID NO: 2031 - DNA, 20 bp, Artificial Sequence
  EGFR Reverse Primer
gagcagcaggtgtttctcct

SEQ ID NO: 2032 - DNA, 20 bp, Artificial Sequence
  EGFR Reverse Primer
tgtgaaccatctgctcttgg

SEQ ID NO: 2033 - DNA, 20 bp, Artificial Sequence
  EGFR Reverse Primer
aaaggaaggtgatgacggtg

SEQ ID NO: 2034 - DNA, 20 bp, Artificial Sequence
  EGFR Reverse Primer
cacaaccttcagtgccttcc

SEQ ID NO: 2035 - DNA, 20 bp, Artificial Sequence
  EGFR Reverse Primer
ctagggatccacaggcagag

SEQ ID NO: 2036 - DNA, 24 bp, Artificial Sequence
  EGFR Reverse Primer
ccaatctctaccagttaaaaaggc

SEQ ID NO: 2037 - DNA, 19 bp, Artificial Sequence
  EGFR Reverse Primer
ttgcctgcaggagaaactg

SEQ ID NO: 2038 - DNA, 20 bp, Artificial Sequence
  EGFR Reverse Primer
tgccaattgtggatctggta

SEQ ID NO: 2039 - DNA, 23 bp, Artificial Sequence
  EGFR Reverse Primer
cacaccacgtaggagtttctttt

SEQ ID NO: 2040 - DNA, 20 bp, Artificial Sequence
  EGFR Reverse Primer
caggagctctgtgccctatc

SEQ ID NO: 2041 - DNA, 20 bp, Artificial Sequence
  EGFR Reverse Primer
tgcaaagtacctgacccaca

SEQ ID NO: 2042 - DNA, 20 bp, Artificial Sequence
  EGFR Reverse Primer
gcaatgcatatttcacgcac

SEQ ID NO: 2043 - DNA, 20 bp, Artificial Sequence
  EGFR Reverse Primer
tctttcccccatctttttcc

SEQ ID NO: 2044 - DNA, 20 bp, Artificial Sequence
  EGFR Reverse Primer
ccctacaggaccacgatgat

SEQ ID NO: 2045 - DNA, 20 bp, Artificial Sequence
  EGFR Reverse Primer
atccatctatccaccaccca

SEQ ID NO: 2046 - DNA, 20 bp, Artificial Sequence
  EGFR Reverse Primer
cttatctccttgagggagcg

SEQ ID NO: 2047 - DNA, 24 bp, Artificial Sequence
  EGFR Reverse Primer
ggaattcacatggtaatttcacag

SEQ ID NO: 2048 - DNA, 20 bp, Artificial Sequence
  EGFR Reverse Primer
aggctctcaccagcttcaaa

SEQ ID NO: 2049 - DNA, 20 bp, Artificial Sequence
  EGFR Reverse Primer
cagagctggtggtgttctga

SEQ ID NO: 2050 - DNA, 20 bp, Artificial Sequence
  EGFR Reverse Primer
gaaatgtgcctgacagtgga

SEQ ID NO: 2051 - DNA, 20 bp, Artificial Sequence
  EGFR Reverse Primer
atttttgatcaacgcaaggg

SEQ ID NO: 2052 - DNA, 20 bp, Artificial Sequence
  EGFR Reverse Primer
cgggcactacaaagaaaagc

SEQ ID NO: 2053 - DNA, 20 bp, Artificial Sequence
  EGFR Reverse Primer
ggtccatgcccagagagtaa

SEQ ID NO: 2054 - DNA, 20 bp, Artificial Sequence
  EGFR Reverse Primer
ctttcatcctcccctttggt

SEQ ID NO: 2055 - DNA, 20 bp, Artificial Sequence
  EGFR Reverse Primer
gggagaatgaactcgctcaa

SEQ ID NO: 2056 - DNA, 20 bp, Artificial Sequence
  EGFR Reverse Primer
tcaaggagttgggactccag

SEQ ID NO: 2057 - DNA, 20 bp, Artificial Sequence
  EGFR Reverse Primer
ctctgggaagtggctctgat

SEQ ID NO: 2058 - DNA, 20 bp, Artificial Sequence
  EGFR Reverse Primer
ggcccgaattctcactcata

SEQ ID NO: 2059 - DNA, 20 bp, Artificial Sequence
  EGFR Reverse Primer
agcactgctcaggttgtgtg

SEQ ID NO: 2060 - DNA, 20 bp, Artificial Sequence
  EGFR Reverse Primer
gcttaaccattgtgggcatc

SEQ ID NO: 2061 - DNA, 20 bp, Artificial Sequence
  EGFR Reverse Primer
cttccagaccagggtgttgt

SEQ ID NO: 2062 - DNA, 20 bp, Artificial Sequence
  EGFR Reverse Primer
ctggagagaaacgcaaaagc

SEQ ID NO: 2063 - DNA, 20 bp, Artificial Sequence
  EGFR Reverse Primer
gatgccaagctctgatgtcc

SEQ ID NO: 2064 - DNA, 20 bp, Artificial Sequence
  EGFR Reverse Primer
ccagaagaaagaaaaggggg

SEQ ID NO: 2065 - DNA, 23 bp, Artificial Sequence
  EGFR Reverse Primer
tgaagatttattaggacctggga

SEQ ID NO: 2066 - DNA, 20 bp, Artificial Sequence
  EGFR Reverse Primer
gctttgggagaagacacagg

SEQ ID NO: 2067 - DNA, 20 bp, Artificial Sequence
  EGFR Reverse Primer
tgtagtctgggctctgatgc

SEQ ID NO: 2068 - DNA, 20 bp, Artificial Sequence
  EGFR Reverse Primer
cccttgaagagaagctggac

SEQ ID NO: 2069 - DNA, 20 bp, Artificial Sequence
  EGFR Reverse Primer
caggagacctcgttactgcc

SEQ ID NO: 2070 - DNA, 20 bp, Artificial Sequence
  EGFR Reverse Primer
caatatgtgagaggcctggg

SEQ ID NO: 2071 - DNA, 20 bp, Artificial Sequence
  EGFR Reverse Primer
tgatcacagatgcagaaggc

SEQ ID NO: 2072 - DNA, 20 bp, Artificial Sequence
  EGFR Reverse Primer
ataattgtcccacagctggc

SEQ ID NO: 2073 - DNA, 19 bp, Artificial Sequence
  EGFR Reverse Primer
gcccagtgcatctgtagga

SEQ ID NO: 2074 - DNA, 20 bp, Artificial Sequence
  EGFR Reverse Primer
ccagcactgtgtgtccaact

SEQ ID NO: 2075 - DNA, 20 bp, Artificial Sequence
  EGFR Reverse Primer
aaaatggcaaacaggtgctc

SEQ ID NO: 2076 - DNA, 20 bp, Artificial Sequence
  EGFR Reverse Primer
gggtgtcctagcagctcact

SEQ ID NO: 2077 - DNA, 20 bp, Artificial Sequence
  EGFR Reverse Primer
agaggaaaccagaagccaca

SEQ ID NO: 2078 - DNA, 20 bp, Artificial Sequence
  EGFR Reverse Primer
ctgggtgaagggactttttg

SEQ ID NO: 2079 - DNA, 20 bp, Artificial Sequence
  EGFR Reverse Primer
ccaggcacacttttcctcat

SEQ ID NO: 2080 - DNA, 19 bp, Artificial Sequence
  EGFR Reverse Primer
actggcactcacctccctc

SEQ ID NO: 2081 - DNA, 20 bp, Artificial Sequence
  EGFR Reverse Primer
ttccagagaacatggcttcc

SEQ ID NO: 2082 - DNA, 20 bp, Artificial Sequence
  EGFR Reverse Primer
tggaaggacaaatgtacgcc

SEQ ID NO: 2083 - DNA, 20 bp, Artificial Sequence
  EGFR Reverse Primer
acagcttgcaaggactctgg

SEQ ID NO: 2084 - DNA, 20 bp, Artificial Sequence
  EGFR Reverse Primer
gaagatgagcccatttcagc

SEQ ID NO: 2085 - DNA, 20 bp, Artificial Sequence
  EGFR Reverse Primer
ccagtgatctgggtggatgt

SEQ ID NO: 2086 - DNA, 20 bp, Artificial Sequence
  EGFR Reverse Primer
gatgtggagatgagcagggt

SEQ ID NO: 2087 - DNA, 20 bp, Artificial Sequence
  EGFR Reverse Primer
gccatataagggtcagccaa

SEQ ID NO: 2088 - DNA, 18 bp, Artificial Sequence
  EGFR Reverse Primer
caccactggctggggaag

SEQ ID NO: 2089 - DNA, 20 bp, Artificial Sequence
  EGFR Reverse Primer
gcttttgtccttcttggctg

SEQ ID NO: 2090 - DNA, 25 bp, Artificial Sequence
  EGFR Reverse Primer
tcttcctgtatttcttgtggttatg

SEQ ID NO: 2091 - DNA, 20 bp, Artificial Sequence
  EGFR Reverse Primer
gaacactgcttccttcccaa

SEQ ID NO: 2092 - DNA, 20 bp, Artificial Sequence
  EGFR Reverse Primer
aaagtgcctcctccagcttc

SEQ ID NO: 2093 - DNA, 20 bp, Artificial Sequence
  EGFR Reverse Primer
tgctagcaacatggaactgg

SEQ ID NO: 2094 - DNA, 20 bp, Artificial Sequence
  EGFR Reverse Primer
gagctttgttctcggctgtt

SEQ ID NO: 2095 - DNA, 20 bp, Artificial Sequence
  EGFR Reverse Primer
tgcaaaccagagcagtttga

SEQ ID NO: 2096 - DNA, 20 bp, Artificial Sequence
  EGFR Reverse Primer
cagagggtaagctgaggctg

SEQ ID NO: 2097 - DNA, 21 bp, Artificial Sequence
  EGFR Reverse Primer
tcctgcagagtgtttaggctc

SEQ ID NO: 2098 - DNA, 20 bp, Artificial Sequence
  EGFR Reverse Primer
ggcacacacttgctcttacg

SEQ ID NO: 2099 - DNA, 20 bp, Artificial Sequence
  EGFR Reverse Primer
cctgggaaccttttagagcc

SEQ ID NO: 2100 - DNA, 20 bp, Artificial Sequence
  EGFR Reverse Primer
ctttccttgccctaaaccct

SEQ ID NO: 2101 - DNA, 20 bp, Artificial Sequence
  EGFR Reverse Primer
ctgctattcttgggctgagg

SEQ ID NO: 2102 - DNA, 20 bp, Artificial Sequence
  EGFR Reverse Primer
gaggacaagcgatggagaag

SEQ ID NO: 2103 - DNA, 20 bp, Artificial Sequence
  EGFR Reverse Primer
gcctgcaaaagacctagcac

SEQ ID NO: 2104 - DNA, 20 bp, Artificial Sequence
  EGFR Reverse Primer
gacatagtccaggaggcagc

SEQ ID NO: 2105 - DNA, 20 bp, Artificial Sequence
  EGFR Reverse Primer
gatgggacaggcactgattt

SEQ ID NO: 2106 - DNA, 20 bp, Artificial Sequence
  EGFR Reverse Primer
tgttctgtgcctgtctccag

SEQ ID NO: 2107 - DNA, 20 bp, Artificial Sequence
  EGFR Reverse Primer
ctgctgtcggagagagatga

SEQ ID NO: 2108 - DNA, 20 bp, Artificial Sequence
  EGFR Reverse Primer
aggtggtccctgcttctaca

SEQ ID NO: 2109 - DNA, 20 bp, Artificial Sequence
  EGFR Reverse Primer
gaggcacacaagaccctctc

SEQ ID NO: 2110 - DNA, 20 bp, Artificial Sequence
  EGFR Reverse Primer
ctctgatgaacggaggaagg

SEQ ID NO: 2111 - DNA, 20 bp, Artificial Sequence
  EGFR Reverse Primer
aacactcagtggggatcagc

SEQ ID NO: 2112 - DNA, 20 bp, Artificial Sequence
  EGFR Reverse Primer
tcaggccctggaaacttaaa

SEQ ID NO: 2113 - DNA, 21 bp, Artificial Sequence
  EGFR Reverse Primer
tgtgcctttgtgagtcaacac

SEQ ID NO: 2114 - DNA, 20 bp, Artificial Sequence
  EGFR Reverse Primer
cagtgcatgaaagccactgt

SEQ ID NO: 2115 - DNA, 20 bp, Artificial Sequence
  EGFR Reverse Primer
ttcattctgagaaccctgcc

SEQ ID NO: 2116 - DNA, 20 bp, Artificial Sequence
  EGFR Reverse Primer
acacagcacgatctgtcagc

SEQ ID NO: 2117 - DNA, 20 bp, Artificial Sequence
  EGFR Reverse Primer
agtcagcaggggtaggctct

SEQ ID NO: 2118 - DNA, 20 bp, Artificial Sequence
  EGFR Reverse Primer
tggcaaacttggggagataa

SEQ ID NO: 2119 - DNA, 20 bp, Artificial Sequence
  EGFR Reverse Primer
gtcctcagcatctcccagtc

SEQ ID NO: 2120 - DNA, 20 bp, Artificial Sequence
  EGFR Reverse Primer
tgagatcttggcaagtgacg

SEQ ID NO: 2121 - DNA, 20 bp, Artificial Sequence
  EGFR Reverse Primer
ggtagaggtaagggatgggg

SEQ ID NO: 2122 - DNA, 20 bp, Artificial Sequence
  EGFR Reverse Primer
tgagaccaagaccaccatca

SEQ ID NO: 2123 - DNA, 20 bp, Artificial Sequence
  EGFR Reverse Primer
aaagaaggctctgctccaca

SEQ ID NO: 2124 - DNA, 20 bp, Artificial Sequence
  EGFR Reverse Primer
gataagagctgcgatacggc

SEQ ID NO: 2125 - DNA, 20 bp, Artificial Sequence
  EGFR Reverse Primer
ggctttaaaggacctgagcc

SEQ ID NO: 2126 - DNA, 20 bp, Artificial Sequence
  EGFR Reverse Primer
aaacggcctgttgaagaatg

SEQ ID NO: 2127 - DNA, 20 bp, Artificial Sequence
  EGFR Reverse Primer
gaaggcgtcctctgtggtag

SEQ ID NO: 2128 - DNA, 20 bp, Artificial Sequence
  EGFR Reverse Primer
cgatgctgacttgctctctg

SEQ ID NO: 2129 - DNA, 20 bp, Artificial Sequence
  EGFR Reverse Primer
aaaagagacgcttgcctgac

SEQ ID NO: 2130 - DNA, 20 bp, Artificial Sequence
  EGFR Reverse Primer
ctctctccaccaagagggtg

SEQ ID NO: 2131 - DNA, 20 bp, Artificial Sequence
  EGFR Reverse Primer
ctggtgtccttgtcacatgc

SEQ ID NO: 2132 - DNA, 20 bp, Artificial Sequence
  EGFR Reverse Primer
cgttcagggtttttaagcca

SEQ ID NO: 2133 - DNA, 20 bp, Artificial Sequence
  EGFR Reverse Primer
acgtcgaggacttatggctg

SEQ ID NO: 2134 - DNA, 20 bp, Artificial Sequence
  EGFR Reverse Primer
ggaaaatgctggctgaccta

SEQ ID NO: 2135 - DNA, 20 bp, Artificial Sequence
  EGFR Reverse Primer
atcctgcagggagagactga

SEQ ID NO: 2136 - DNA, 20 bp, Artificial Sequence
  EGFR Reverse Primer
ggccagagtgaaacctcaga

SEQ ID NO: 2137 - DNA, 20 bp, Artificial Sequence
  EGFR Reverse Primer
tggtgagagatgaggcagtg

SEQ ID NO: 2138 - DNA, 20 bp, Artificial Sequence
  EGFR Reverse Primer
ctggactcgatttcctctgc

SEQ ID NO: 2139 - DNA, 20 bp, Artificial Sequence
  EGFR Reverse Primer
agtgtgtgtttgtcaagccg

SEQ ID NO: 2140 - DNA, 20 bp, Artificial Sequence
  EGFR Reverse Primer
cagcggtcagagacaatgtg

SEQ ID NO: 2141 - DNA, 22 bp, Artificial Sequence
  EGFR Reverse Primer
tcccaaataattttgcttttgt

SEQ ID NO: 2142 - DNA, 19 bp, Artificial Sequence
  EGFR Reverse Primer
gaagaggggagaccagcag

SEQ ID NO: 2143 - DNA, 20 bp, Artificial Sequence
  EGFR Reverse Primer
gtgtgaccacatcaaggcac

SEQ ID NO: 2144 - DNA, 20 bp, Artificial Sequence
  EGFR Reverse Primer
ggtacaacacactaggcccc

SEQ ID NO: 2145 - DNA, 20 bp, Artificial Sequence
  EGFR Reverse Primer
attcttgtgtcatcccctgc

SEQ ID NO: 2146 - DNA, 22 bp, Artificial Sequence
  EGFR Reverse Primer
aaccctcatgtttttccttcaa

SEQ ID NO: 2147 - DNA, 24 bp, Artificial Sequence
  EGFR Reverse Primer
cccagcaagtagtaagtgactgat

SEQ ID NO: 2148 - DNA, 20 bp, Artificial Sequence
  EGFR Reverse Primer
gcaagaaaagaaggcagtgg

SEQ ID NO: 2149 - DNA, 20 bp, Artificial Sequence
  EGFR Reverse Primer
tgggcaaatgtcaggtcata

SEQ ID NO: 2150 - DNA, 20 bp, Artificial Sequence
  EGFR Reverse Primer
gccacactgcagagacttca

SEQ ID NO: 2151 - DNA, 20 bp, Artificial Sequence
  EGFR Reverse Primer
aaatcacgtggcttctctgg

SEQ ID NO: 2152 - DNA, 20 bp, Artificial Sequence
  EGFR Reverse Primer
ccacccttagcattccttca

SEQ ID NO: 2153 - DNA, 20 bp, Artificial Sequence
  EGFR Reverse Primer
aaagaaggcattggtgatgc

SEQ ID NO: 2154 - DNA, 20 bp, Artificial Sequence
  EGFR Reverse Primer
cacggatgctgcttagttca

SEQ ID NO: 2155 - DNA, 20 bp, Artificial Sequence
  EGFR Reverse Primer
cctgtgagcttggttttggt

SEQ ID NO: 2156 - DNA, 20 bp, Artificial Sequence
  EGFR Reverse Primer
aatgaaatcccccttggttc

SEQ ID NO: 2157 - DNA, 20 bp, Artificial Sequence
  EGFR Reverse Primer
agagagctcaggaggggagt

SEQ ID NO: 2158 - DNA, 20 bp, Artificial Sequence
  EGFR Reverse Primer
tgctggttgcactctgaaaa

SEQ ID NO: 2159 - DNA, 20 bp, Artificial Sequence
  EGFR Reverse Primer
cagacatcagcatcacctgg

SEQ ID NO: 2160 - DNA, 20 bp, Artificial Sequence
  EGFR Reverse Primer
ctgccccaacttcagtgttt

SEQ ID NO: 2161 - DNA, 20 bp, Artificial Sequence
  EGFR Reverse Primer
tgcaaatctgccactgtttc

SEQ ID NO: 2162 - DNA, 20 bp, Artificial Sequence
  EGFR Reverse Primer
aggattctgcacagagccag

SEQ ID NO: 2163 - DNA, 20 bp, Artificial Sequence
  EGFR Reverse Primer
ttggtcctgggtatcgaaag

SEQ ID NO: 2164 - DNA, 20 bp, Artificial Sequence
  EGFR Reverse Primer
gcctggatgaactcagggta

SEQ ID NO: 2165 - DNA, 20 bp, Artificial Sequence
  EGFR Reverse Primer
aggaagaattccatcccctc

SEQ ID NO: 2166 - DNA, 20 bp, Artificial Sequence
  EGFR Reverse Primer
ttggtccaaatgctgatgaa

SEQ ID NO: 2167 - DNA, 20 bp, Artificial Sequence
  EGFR Reverse Primer
gtgacaaagcgtaaggaggg

SEQ ID NO: 2168 - DNA, 20 bp, Artificial Sequence
  EGFR Reverse Primer
ggtgggctcctaactagctg

SEQ ID NO: 2169 - DNA, 20 bp, Artificial Sequence
  EGFR Reverse Primer
acaatgctgtaggggctctg

SEQ ID NO: 2170 - DNA, 19 bp, Artificial Sequence
  EGFR Reverse Primer
cccttccaggtctcctcag

SEQ ID NO: 2171 - DNA, 20 bp, Artificial Sequence
  EGFR Reverse Primer
tttctgcatgtcctgaggtg

SEQ ID NO: 2172 - DNA, 23 bp, Artificial Sequence
  EGFR Reverse Primer
gagaactattttgggaagcacaa

SEQ ID NO: 2173 - DNA, 20 bp, Artificial Sequence
  EGFR Reverse Primer
ccaatggacaggctttctgt

SEQ ID NO: 2174 - DNA, 20 bp, Artificial Sequence
  EGFR Reverse Primer
agtgctcccccttacaacct

SEQ ID NO: 2175 - DNA, 20 bp, Artificial Sequence
  EGFR Reverse Primer
ccagcgagtgccaagtagat

SEQ ID NO: 2176 - DNA, 20 bp, Artificial Sequence
  EGFR Reverse Primer
attctactctgacgggggct

SEQ ID NO: 2177 - DNA, 20 bp, Artificial Sequence
  EGFR Reverse Primer
aggcaaggaaatgtgagcag

SEQ ID NO: 2178 - DNA, 21 bp, Artificial Sequence
  EGFR Reverse Primer
cctcttgcctcaacttaaccc

SEQ ID NO: 2179 - DNA, 20 bp, Artificial Sequence
  EGFR Reverse Primer
gagtatggcatgcaactgga

SEQ ID NO: 2180 - DNA, 20 bp, Artificial Sequence
  EGFR Reverse Primer
acttctctagggtggctggg

SEQ ID NO: 2181 - DNA, 20 bp, Artificial Sequence
  EGFR Reverse Primer
ttagggagggcaacaatgtc

SEQ ID NO: 2182 - DNA, 20 bp, Artificial Sequence
  EGFR Reverse Primer
tgcagagagacatggaagga

SEQ ID NO: 2183 - DNA, 22 bp, Artificial Sequence
  EGFR Reverse Primer
tgctttcatcattgcaaaactt

SEQ ID NO: 2184 - DNA, 20 bp, Artificial Sequence
  EGFR Reverse Primer
tgctgggacccacttaattc

SEQ ID NO: 2185 - DNA, 20 bp, Artificial Sequence
  EGFR Reverse Primer
gggttttgggaagctgttct

SEQ ID NO: 2186 - DNA, 20 bp, Artificial Sequence
  EGFR Reverse Primer
attaggggtggtgtgagctg

SEQ ID NO: 2187 - DNA, 20 bp, Artificial Sequence
  EGFR Reverse Primer
aggagctgagagagcagtgg

SEQ ID NO: 2188 - DNA, 20 bp, Artificial Sequence
  EGFR Reverse Primer
actgagtctgccctgaggtg

SEQ ID NO: 2189 - DNA, 20 bp, Artificial Sequence
  EGFR Reverse Primer
gatcttgctgcttctcgacc

SEQ ID NO: 2190 - DNA, 20 bp, Artificial Sequence
  EGFR Reverse Primer
ctaggtttcctagccctgcg

SEQ ID NO: 2191 - DNA, 20 bp, Artificial Sequence
  EGFR Reverse Primer
agcctgttcagagccttcag

SEQ ID NO: 2192 - DNA, 20 bp, Artificial Sequence
  EGFR Reverse Primer
aggttcctgttgggttttca

SEQ ID NO: 2193 - DNA, 20 bp, Artificial Sequence
  EGFR Reverse Primer
ttgtgggtttgtcactgcat

SEQ ID NO: 2194 - DNA, 20 bp, Artificial Sequence
  EGFR Reverse Primer
tccaaaaccatttggacctg

SEQ ID NO: 2195 - DNA, 25 bp, Artificial Sequence
  EGFR Reverse Primer
catttcacctattattttcctcacg

SEQ ID NO: 2196 - DNA, 20 bp, Artificial Sequence
  EGFR Reverse Primer
tctcttgtcccccaaaacac

SEQ ID NO: 2197 - DNA, 26 bp, Artificial Sequence
  EGFR Reverse Primer
tgctattttaaatggaattcttttcc

SEQ ID NO: 2198 - DNA, 25 bp, Artificial Sequence
  EGFR Reverse Primer
ccaaattctaaagcttatactcccc

SEQ ID NO: 2199 - DNA, 20 bp, Artificial Sequence
  EGFR Reverse Primer
ctccaaaatcatttgctggg

SEQ ID NO: 2200 - DNA, 25 bp, Artificial Sequence
  EGFR Reverse Primer
cattggaatacttcacattttaggg

SEQ ID NO: 2201 - DNA, 20 bp, Artificial Sequence
  EGFR Reverse Primer
cattccacctgaagtggtcc

SEQ ID NO: 2202 - DNA, 20 bp, Artificial Sequence
  EGFR Reverse Primer
cgttgtctctattcccccaa

SEQ ID NO: 2203 - DNA, 25 bp, Artificial Sequence
  EGFR Reverse Primer
tcttagatgtacactcaggacagtg

SEQ ID NO: 2204 - DNA, 20 bp, Artificial Sequence
  EGFR Reverse Primer
catctgcgggtgtaaaggtt

SEQ ID NO: 2205 - DNA, 20 bp, Artificial Sequence
  EGFR Reverse Primer
tgggtgctgaaagatgacaa

SEQ ID NO: 2206 - DNA, 20 bp, Artificial Sequence
  EGFR Reverse Primer
actccatggtgacttcaggc

SEQ ID NO: 2207 - DNA, 20 bp, Artificial Sequence
  EGFR Reverse Primer
gaaggaggtgagagctgtgg

SEQ ID NO: 2208 - DNA, 20 bp, Artificial Sequence
  EGFR Reverse Primer
ggttccaaggagcctttttc

SEQ ID NO: 2209 - DNA, 20 bp, Artificial Sequence
  EGFR Reverse Primer
ggggatgggtgtagggtact

SEQ ID NO: 2210 - DNA, 20 bp, Artificial Sequence
  EGFR Reverse Primer
tagtggagacaggggaaagg

SEQ ID NO: 2211 - DNA, 20 bp, Artificial Sequence
  EGFR Reverse Primer
ggacaaggcaaaaaccaaaa

SEQ ID NO: 2212 - DNA, 21 bp, Artificial Sequence
  EGFR Reverse Primer
tcaaaaatgaaagttccctgg

SEQ ID NO: 2213 - DNA, 20 bp, Artificial Sequence
  EGFR Reverse Primer
gcttttcttcgccagagcta

SEQ ID NO: 2214 - DNA, 20 bp, Artificial Sequence
  EGFR Reverse Primer
gaagtggggagtcctaaggg

SEQ ID NO: 2215 - DNA, 20 bp, Artificial Sequence
  EGFR Reverse Primer
gatgaaagctggcacagtca

SEQ ID NO: 2216 - DNA, 20 bp, Artificial Sequence
  EGFR Reverse Primer
gtgtgccctgggtactgtct

SEQ ID NO: 2217 - DNA, 20 bp, Artificial Sequence
  EGFR Reverse Primer
cactcttttcctcccaccag

SEQ ID NO: 2218 - DNA, 20 bp, Artificial Sequence
  EGFR Reverse Primer
ggggtctgcatgactgaaat

SEQ ID NO: 2219 - DNA, 20 bp, Artificial Sequence
  EGFR Reverse Primer
cctccaggcaaacgttagaa

SEQ ID NO: 2220 - DNA, 20 bp, Artificial Sequence
  EGFR Reverse Primer
tttgtaaattcgggggtgag

SEQ ID NO: 2221 - DNA, 20 bp, Artificial Sequence
  EGFR Reverse Primer
tgcagagcaattccaaatga

SEQ ID NO: 2222 - DNA, 20 bp, Artificial Sequence
  EGFR Reverse Primer
agatctcgcagctcttgctc

SEQ ID NO: 2223 - DNA, 20 bp, Artificial Sequence
  EGFR Reverse Primer
ccgcatagctcctactttcg

SEQ ID NO: 2224 - DNA, 20 bp, Artificial Sequence
  EGFR Reverse Primer
tatcccagacacggaggaag

SEQ ID NO: 2225 - DNA, 20 bp, Artificial Sequence
  EGFR Reverse Primer
gcttgtactttgggtcaggc

SEQ ID NO: 2226 - DNA, 20 bp, Artificial Sequence
  EGFR Reverse Primer
tgaattggaaactcgcagtg

SEQ ID NO: 2227 - DNA, 20 bp, Artificial Sequence
  EGFR Reverse Primer
tccccaaattgaaatccaaa

SEQ ID NO: 2228 - DNA, 20 bp, Artificial Sequence
  EGFR Reverse Primer
atctgttgacggtgggattc

SEQ ID NO: 2229 - DNA, 20 bp, Artificial Sequence
  EGFR Reverse Primer
cagtgcagcagggtaagtca

SEQ ID NO: 2230 - DNA, 20 bp, Artificial Sequence
  EGFR Reverse Primer
ggaggcacacctctcttctg

SEQ ID NO: 2231 - DNA, 20 bp, Artificial Sequence
  EGFR Reverse Primer
tgacccctccttacaaccac

SEQ ID NO: 2232 - DNA, 20 bp, Artificial Sequence
  EGFR Reverse Primer
ccagaagggcagtctctgtc

SEQ ID NO: 2233 - DNA, 20 bp, Artificial Sequence
  EGFR Reverse Primer
tctgactggaatgggatgag

SEQ ID NO: 2234 - DNA, 20 bp, Artificial Sequence
  EGFR Reverse Primer
ctcacccttgtctgctgctt

SEQ ID NO: 2235 - DNA, 18 bp, Artificial Sequence
  EGFR Reverse Primer
accgaggccctgacttct

SEQ ID NO: 2236 - DNA, 19 bp, Artificial Sequence
  EGFR Reverse Primer
tgcgtatccccagacacat

SEQ ID NO: 2237 - DNA, 20 bp, Artificial Sequence
  EGFR Reverse Primer
ctccttcctcttggcatttg

SEQ ID NO: 2238 - DNA, 20 bp, Artificial Sequence
  EGFR Reverse Primer
atggttggtttctgtgccat

SEQ ID NO: 2239 - DNA, 20 bp, Artificial Sequence
  EGFR Reverse Primer
gcaaagcacaaaatgcaaaa

SEQ ID NO: 2240 - DNA, 20 bp, Artificial Sequence
  EGFR Reverse Primer
ttattcccaccatcctcacc

SEQ ID NO: 2241 - DNA, 21 bp, Artificial Sequence
  EGFR Reverse Primer
tgaatcagagcagaaaaggga

SEQ ID NO: 2242 - DNA, 20 bp, Artificial Sequence
  EGFR Reverse Primer
gcaccagtcctaggaagcag

SEQ ID NO: 2243 - DNA, 24 bp, Artificial Sequence
  EGFR Reverse Primer
gaaaaggaatggttttatttttgc

SEQ ID NO: 2244 - DNA, 20 bp, Artificial Sequence
  EGFR Reverse Primer
ggatgatgatggtggtggat

SEQ ID NO: 2245 - DNA, 20 bp, Artificial Sequence
  EGFR Reverse Primer
tgcccagggtaaagagtttg

SEQ ID NO: 2246 - DNA, 20 bp, Artificial Sequence
  EGFR Reverse Primer
actcgggtcatggtctgaag

SEQ ID NO: 2247 - DNA, 20 bp, Artificial Sequence
  EGFR Reverse Primer
gcctctgcttctcatccttg

SEQ ID NO: 2248 - DNA, 20 bp, Artificial Sequence
  EGFR Reverse Primer
gcccctgattttctctctcc

SEQ ID NO: 2249 - DNA, 20 bp, Artificial Sequence
  EGFR Reverse Primer
gaatcactccgatgggacac

SEQ ID NO: 2250 - DNA, 20 bp, Artificial Sequence
  EGFR Reverse Primer
ggctttgggctcctaactct

SEQ ID NO: 2251 - DNA, 20 bp, Artificial Sequence
  EGFR Reverse Primer
gtatccttgcgtctgctggt

SEQ ID NO: 2252 - DNA, 20 bp, Artificial Sequence
  EGFR Reverse Primer
ctctgcactggtgttccaga

SEQ ID NO: 2253 - DNA, 20 bp, Artificial Sequence
  EGFR Reverse Primer
aaaaattgcttttcccctgg

SEQ ID NO: 2254 - DNA, 20 bp, Artificial Sequence
  EGFR Reverse Primer
cccaggaagctagcccttag

SEQ ID NO: 2255 - DNA, 20 bp, Artificial Sequence
  EGFR Reverse Primer
cacagtccacctatggttgc

SEQ ID NO: 2256 - DNA, 20 bp, Artificial Sequence
  EGFR Reverse Primer
gaagccccttccactaggtc

SEQ ID NO: 2257 - DNA, 20 bp, Artificial Sequence
  EGFR Reverse Primer
atttgtttcaccttgggcag

SEQ ID NO: 2258 - DNA, 20 bp, Artificial Sequence
  EGFR Reverse Primer
gagagggtgtctcctgggtc

SEQ ID NO: 2259 - DNA, 20 bp, Artificial Sequence
  EGFR Reverse Primer
aaataggaaacgccacgatg

SEQ ID NO: 2260 - DNA, 18 bp, Artificial Sequence
  EGFR Reverse Primer
cttttcggaggctggcac

SEQ ID NO: 2261 - DNA, 20 bp, Artificial Sequence
  EGFR Reverse Primer
gcatagtggctcatgggatt

SEQ ID NO: 2262 - DNA, 19 bp, Artificial Sequence
  EGFR Reverse Primer
ttgtcaagatcctcacggg

SEQ ID NO: 2263 - DNA, 20 bp, Artificial Sequence
  EGFR Reverse Primer
cgatggcttcgcatcttaat

SEQ ID NO: 2264 - DNA, 21 bp, Artificial Sequence
  EGFR Reverse Primer
aggagcaactcagacaggaaa

SEQ ID NO: 2265 - DNA, 20 bp, Artificial Sequence
  HER2 3kb Forward Primer
acgcctgatgggttaatgag

SEQ ID NO: 2266 - DNA, 20 bp, Artificial Sequence
  HER2 3kb Forward Primer
actggtctccctcactccct

SEQ ID NO: 2267 - DNA, 20 bp, Artificial Sequence
  HER2 3kb Forward Primer
cttgacaaatccagggctgt

SEQ ID NO: 2268 - DNA, 20 bp, Artificial Sequence
  HER2 3kb Forward Primer
tgaagggcaaaggaagagaa

SEQ ID NO: 2269 - DNA, 20 bp, Artificial Sequence
  HER2 3kb Forward Primer
tgtgaccaggaaccattctg

SEQ ID NO: 2270 - DNA, 20 bp, Artificial Sequence
  HER2 3kb Forward Primer
caaaagtgaggtgagtcgca

SEQ ID NO: 2271 - DNA, 20 bp, Artificial Sequence
  HER2 3kb Forward Primer
cacccctaggaaggaccaat

SEQ ID NO: 2272 - DNA, 20 bp, Artificial Sequence
  HER2 3kb Forward Primer
gatctgagtttgctgccctc

SEQ ID NO: 2273 - DNA, 20 bp, Artificial Sequence
  HER2 3kb Forward Primer
ccccttcctctcctcttgtc

SEQ ID NO: 2274 - DNA, 20 bp, Artificial Sequence
  HER2 3kb Forward Primer
atgcagagaggatgggtttg

SEQ ID NO: 2275 - DNA, 20 bp, Artificial Sequence
  HER2 3kb Forward Primer
cgatgtgactgtctcctccc

SEQ ID NO: 2276 - DNA, 20 bp, Artificial Sequence
  HER2 3kb Forward Primer
agagtcaccagcctctgcat

SEQ ID NO: 2277 - DNA, 20 bp, Artificial Sequence
  HER2 3kb Forward Primer
ctcctatcccgaagttgtgg

SEQ ID NO: 2278 - DNA, 20 bp, Artificial Sequence
  HER2 3kb Forward Primer
ctccccttcagacgattttg

SEQ ID NO: 2279 - DNA, 20 bp, Artificial Sequence
  HER2 3kb Forward Primer
gttctgctgccttttccttg

SEQ ID NO: 2280 - DNA, 20 bp, Artificial Sequence
  HER2 3kb Reverse Primer
aagtagaggcagggagagcc

SEQ ID NO: 2281 - DNA, 20 bp, Artificial Sequence
  HER2 3kb Reverse Primer
ccaaattctgtgctggaggt

SEQ ID NO: 2282 - DNA, 20 bp, Artificial Sequence
  HER2 3kb Reverse Primer
gagagtgggggaggagaaag

SEQ ID NO: 2283 - DNA, 20 bp, Artificial Sequence
  HER2 3kb Reverse Primer
cttgctcactcgacttgctg

SEQ ID NO: 2284 - DNA, 20 bp, Artificial Sequence
  HER2 3kb Reverse Primer
tcactctcatcactgcctgc

SEQ ID NO: 2285 - DNA, 20 bp, Artificial Sequence
  HER2 3kb Reverse Primer
actccctgagcccaggatta

SEQ ID NO: 2286 - DNA, 20 bp, Artificial Sequence
  HER2 3kb Reverse Primer
agtcgtctggtccacagtcc

SEQ ID NO: 2287 - DNA, 20 bp, Artificial Sequence
  HER2 3kb Reverse Primer
gctgctgattcgatttcctc

SEQ ID NO: 2288 - DNA, 18 bp, Artificial Sequence
  HER2 3kb Reverse Primer
cagacaatgcccagtccc

SEQ ID NO: 2289 - DNA, 20 bp, Artificial Sequence
  HER2 3kb Reverse Primer
ggaactttcccaaggtcaca

SEQ ID NO: 2290 - DNA, 20 bp, Artificial Sequence
  HER2 3kb Reverse Primer
atcctactccatcccaagcc

SEQ ID NO: 2291 - DNA, 20 bp, Artificial Sequence
  HER2 3kb Reverse Primer
cacctcctccttctcctgtg

SEQ ID NO: 2292 - DNA, 20 bp, Artificial Sequence
  HER2 3kb Reverse Primer
cgctctacgcaatacaccct

SEQ ID NO: 2293 - DNA, 20 bp, Artificial Sequence
  HER2 3kb Reverse Primer
gagcacagtccctaagctgg

SEQ ID NO: 2294 - DNA, 20 bp, Artificial Sequence
  HER2 3kb Reverse Primer
atgctggcagaacttccact

SEQ ID NO: 2295 - DNA, 20 bp, Artificial Sequence
  HER2 40kb Forward Primer
acgcctgatgggttaatgag

SEQ ID NO: 2296 - DNA, 20 bp, Artificial Sequence
  HER2 40kb Forward Primer
actggtctccctcactccct

SEQ ID NO: 2297 - DNA, 20 bp, Artificial Sequence
  HER2 40kb Forward Primer
cttgacaaatccagggctgt

SEQ ID NO: 2298 - DNA, 20 bp, Artificial Sequence
  HER2 40kb Forward Primer
tgaagggcaaaggaagagaa

SEQ ID NO: 2299 - DNA, 20 bp, Artificial Sequence
  HER2 40kb Forward Primer
tgtgaccaggaaccattctg

SEQ ID NO: 2300 - DNA, 20 bp, Artificial Sequence
  HER2 40kb Forward Primer
caaaagtgaggtgagtcgca

SEQ ID NO: 2301 - DNA, 20 bp, Artificial Sequence
  HER2 40kb Forward Primer
cacccctaggaaggaccaat

SEQ ID NO: 2302 - DNA, 20 bp, Artificial Sequence
  HER2 40kb Forward Primer
gatctgagtttgctgccctc

SEQ ID NO: 2303 - DNA, 20 bp, Artificial Sequence
  HER2 40kb Forward Primer
ccccttcctctcctcttgtc

SEQ ID NO: 2304 - DNA, 20 bp, Artificial Sequence
  HER2 40kb Forward Primer
atgcagagaggatgggtttg

SEQ ID NO: 2305 - DNA, 20 bp, Artificial Sequence
  HER2 40kb Forward Primer
cgatgtgactgtctcctccc

SEQ ID NO: 2306 - DNA, 20 bp, Artificial Sequence
  HER2 40kb Forward Primer
agagtcaccagcctctgcat

SEQ ID NO: 2307 - DNA, 20 bp, Artificial Sequence
  HER2 40kb Forward Primer
ctcctatcccgaagttgtgg

SEQ ID NO: 2308 - DNA, 20 bp, Artificial Sequence
  HER2 40kb Forward Primer
ctccccttcagacgattttg

SEQ ID NO: 2309 - DNA, 20 bp, Artificial Sequence
  HER2 40kb Forward Primer
gttctgctgccttttccttg

SEQ ID NO: 2310 - DNA, 20 bp, Artificial Sequence
  HER2 40kb Forward Primer
gcaggggagacaaaatgaaa

SEQ ID NO: 2311 - DNA, 20 bp, Artificial Sequence
  HER2 40kb Forward Primer
tccagccaacaataatgggt

SEQ ID NO: 2312 - DNA, 20 bp, Artificial Sequence
  HER2 40kb Forward Primer
ccagggtagttgtgcctgtc

SEQ ID NO: 2313 - DNA, 20 bp, Artificial Sequence
  HER2 40kb Forward Primer
catgtttacagatggctgcg

SEQ ID NO: 2314 - DNA, 20 bp, Artificial Sequence
  HER2 40kb Forward Primer
agtctgttgggggaggaagt

SEQ ID NO: 2315 - DNA, 20 bp, Artificial Sequence
  HER2 40kb Forward Primer
ttgtgctgtccctgaatctg

SEQ ID NO: 2316 - DNA, 20 bp, Artificial Sequence
  HER2 40kb Forward Primer
tatgcagggctgacgtagtg

SEQ ID NO: 2317 - DNA, 20 bp, Artificial Sequence
  HER2 40kb Forward Primer
aactccagctgaccctcctt

SEQ ID NO: 2318 - DNA, 20 bp, Artificial Sequence
  HER2 40kb Forward Primer
gaagcctttcccctgaaatc

SEQ ID NO: 2319 - DNA, 20 bp, Artificial Sequence
  HER2 40kb Forward Primer
ctggaactcacctacctgcc

SEQ ID NO: 2320 - DNA, 20 bp, Artificial Sequence
  HER2 40kb Forward Primer
tcggagtttatgaaatgccc

SEQ ID NO: 2321 - DNA, 20 bp, Artificial Sequence
  HER2 40kb Forward Primer
acaaccaagtgaggcaggtc

SEQ ID NO: 2322 - DNA, 19 bp, Artificial Sequence
  HER2 40kb Forward Primer
cactgctaaccagggggag

SEQ ID NO: 2323 - DNA, 20 bp, Artificial Sequence
  HER2 40kb Forward Primer
agcatctggacctagcatgg

SEQ ID NO: 2324 - DNA, 20 bp, Artificial Sequence
  HER2 40kb Forward Primer
ggacacgattttgtggaagg

SEQ ID NO: 2325 - DNA, 20 bp, Artificial Sequence
  HER2 40kb Forward Primer
tccctgtgcctcttcatctc

SEQ ID NO: 2326 - DNA, 20 bp, Artificial Sequence
  HER2 40kb Forward Primer
tctccgatgtgtaagggctc

SEQ ID NO: 2327 - DNA, 20 bp, Artificial Sequence
  HER2 40kb Forward Primer
cctcctctcacaggaacagg

SEQ ID NO: 2328 - DNA, 20 bp, Artificial Sequence
  HER2 40kb Forward Primer
acacagcggtgtgagaagtg

SEQ ID NO: 2329 - DNA, 20 bp, Artificial Sequence
  HER2 40kb Forward Primer
aaagggtttgagtgaaggca

SEQ ID NO: 2330 - DNA, 20 bp, Artificial Sequence
  HER2 40kb Forward Primer
tgagcactgagaaagagggg

SEQ ID NO: 2331 - DNA, 20 bp, Artificial Sequence
  HER2 40kb Forward Primer
agttccctggttcacttgga

SEQ ID NO: 2332 - DNA, 20 bp, Artificial Sequence
  HER2 40kb Forward Primer
tggctcagtgacctgttttg

SEQ ID NO: 2333 - DNA, 20 bp, Artificial Sequence
  HER2 40kb Forward Primer
tgcttccaaccttggttttt

SEQ ID NO: 2334 - DNA, 20 bp, Artificial Sequence
  HER2 40kb Forward Primer
agactgggtgaagagcaagg

SEQ ID NO: 2335 - DNA, 21 bp, Artificial Sequence
  HER2 40kb Forward Primer
cctagatccagatcacggtgt

SEQ ID NO: 2336 - DNA, 20 bp, Artificial Sequence
  HER2 40kb Forward Primer
tcctatccaccacaaggagc

SEQ ID NO: 2337 - DNA, 20 bp, Artificial Sequence
  HER2 40kb Forward Primer
ctgtgtggacctggatgaca

SEQ ID NO: 2338 - DNA, 20 bp, Artificial Sequence
  HER2 40kb Forward Primer
aggggactgcaaggaaagat

SEQ ID NO: 2339 - DNA, 20 bp, Artificial Sequence
  HER2 40kb Forward Primer
gaatctggagatgcggagag

SEQ ID NO: 2340 - DNA, 20 bp, Artificial Sequence
  HER2 40kb Forward Primer
gatccggaagtacacgatgc

SEQ ID NO: 2341 - DNA, 20 bp, Artificial Sequence
  HER2 40kb Forward Primer
gctgtggtttgtgatggttg

SEQ ID NO: 2342 - DNA, 20 bp, Artificial Sequence
  HER2 40kb Forward Primer
gagctacctggaggatgtgc

SEQ ID NO: 2343 - DNA, 20 bp, Artificial Sequence
  HER2 40kb Forward Primer
ggttcacccaccagagtgat

SEQ ID NO: 2344 - DNA, 20 bp, Artificial Sequence
  HER2 40kb Forward Primer
ctagcatgctgacctccctc

SEQ ID NO: 2345 - DNA, 20 bp, Artificial Sequence
  HER2 40kb Forward Primer
gacagcaccttctaccgctc

SEQ ID NO: 2346 - DNA, 20 bp, Artificial Sequence
  HER2 40kb Forward Primer
ctcctgtgaccctgtcacct

SEQ ID NO: 2347 - DNA, 18 bp, Artificial Sequence
  HER2 40kb Forward Primer
acatgaccccagccctct

SEQ ID NO: 2348 - DNA, 20 bp, Artificial Sequence
  HER2 40kb Forward Primer
tgggtcaccttctcttgacc

SEQ ID NO: 2349 - DNA, 20 bp, Artificial Sequence
  HER2 40kb Forward Primer
acggcagagaacccagagta

SEQ ID NO: 2350 - DNA, 20 bp, Artificial Sequence
  HER2 40kb Reverse Primer
aagtagaggcagggagagcc

SEQ ID NO: 2351 - DNA, 20 bp, Artificial Sequence
  HER2 40kb Reverse Primer
ccaaattctgtgctggaggt

SEQ ID NO: 2352 - DNA, 20 bp, Artificial Sequence
  HER2 40kb Reverse Primer
gagagtgggggaggagaaag

SEQ ID NO: 2353 - DNA, 20 bp, Artificial Sequence
  HER2 40kb Reverse Primer
cttgctcactcgacttgctg

SEQ ID NO: 2354 - DNA, 20 bp, Artificial Sequence
  HER2 40kb Reverse Primer
tcactctcatcactgcctgc

SEQ ID NO: 2355 - DNA, 20 bp, Artificial Sequence
  HER2 40kb Reverse Primer
actccctgagcccaggatta

SEQ ID NO: 2356 - DNA, 20 bp, Artificial Sequence
  HER2 40kb Reverse Primer
agtcgtctggtccacagtcc

SEQ ID NO: 2357 - DNA, 20 bp, Artificial Sequence
  HER2 40kb Reverse Primer
gctgctgattcgatttcctc

SEQ ID NO: 2358 - DNA, 18 bp, Artificial Sequence
  HER2 40kb Reverse Primer
cagacaatgcccagtccc

SEQ ID NO: 2359 - DNA, 20 bp, Artificial Sequence
  HER2 40kb Reverse Primer
ggaactttcccaaggtcaca

SEQ ID NO: 2360 - DNA, 20 bp, Artificial Sequence
  HER2 40kb Reverse Primer
atcctactccatcccaagcc

SEQ ID NO: 2361 - DNA, 20 bp, Artificial Sequence
  HER2 40kb Reverse Primer
cacctcctccttctcctgtg

SEQ ID NO: 2362 - DNA, 20 bp, Artificial Sequence
  HER2 40kb Reverse Primer
cgctctacgcaatacaccct

SEQ ID NO: 2363 - DNA, 20 bp, Artificial Sequence
  HER2 40kb Reverse Primer
gagcacagtccctaagctgg

SEQ ID NO: 2364 - DNA, 20 bp, Artificial Sequence
  HER2 40kb Reverse Primer
atgctggcagaacttccact

SEQ ID NO: 2365 - DNA, 20 bp, Artificial Sequence
  HER2 40kb Reverse Primer
acacaaagcccagacacaca

SEQ ID NO: 2366 - DNA, 20 bp, Artificial Sequence
  HER2 40kb Reverse Primer
gtagggcccaaaaggaagac

SEQ ID NO: 2367 - DNA, 20 bp, Artificial Sequence
  HER2 40kb Reverse Primer
tgggacaacacaaacattcg

SEQ ID NO: 2368 - DNA, 20 bp, Artificial Sequence
  HER2 40kb Reverse Primer
accctagctcagctgctcac

SEQ ID NO: 2369 - DNA, 20 bp, Artificial Sequence
  HER2 40kb Reverse Primer
ccacaaactggtggtctcct

SEQ ID NO: 2370 - DNA, 20 bp, Artificial Sequence
  HER2 40kb Reverse Primer
ctgccagtgaggggagatta

SEQ ID NO: 2371 - DNA, 20 bp, Artificial Sequence
  HER2 40kb Reverse Primer
ccatgaagagaaaaggagcg

SEQ ID NO: 2372 - DNA, 20 bp, Artificial Sequence
  HER2 40kb Reverse Primer
cagggcaaaggggtaaaaat

SEQ ID NO: 2373 - DNA, 20 bp, Artificial Sequence
  HER2 40kb Reverse Primer
gagagcagatgggtcagagg

SEQ ID NO: 2374 - DNA, 20 bp, Artificial Sequence
  HER2 40kb Reverse Primer
tgcagtaaaatgaatggggg

SEQ ID NO: 2375 - DNA, 20 bp, Artificial Sequence
  HER2 40kb Reverse Primer
tggggctgaaataggaacac

SEQ ID NO: 2376 - DNA, 20 bp, Artificial Sequence
  HER2 40kb Reverse Primer
ggtttcaatgacggtgaagg

SEQ ID NO: 2377 - DNA, 20 bp, Artificial Sequence
  HER2 40kb Reverse Primer
acttcactcagccaagtggg

SEQ ID NO: 2378 - DNA, 20 bp, Artificial Sequence
  HER2 40kb Reverse Primer
tccccttctgtcaccttctg

SEQ ID NO: 2379 - DNA, 20 bp, Artificial Sequence
  HER2 40kb Reverse Primer
agggacagagagggaggaaa

SEQ ID NO: 2380 - DNA, 20 bp, Artificial Sequence
  HER2 40kb Reverse Primer
gcctgaggacagaaccagag

SEQ ID NO: 2381 - DNA, 20 bp, Artificial Sequence
  HER2 40kb Reverse Primer
gaccctcatcagcatcacct

SEQ ID NO: 2382 - DNA, 20 bp, Artificial Sequence
  HER2 40kb Reverse Primer
acccctcacaacaaccagac

SEQ ID NO: 2383 - DNA, 20 bp, Artificial Sequence
  HER2 40kb Reverse Primer
gggacacttgtagggctgag

SEQ ID NO: 2384 - DNA, 20 bp, Artificial Sequence
  HER2 40kb Reverse Primer
ctgcagaacaggatgcagag

SEQ ID NO: 2385 - DNA, 20 bp, Artificial Sequence
  HER2 40kb Reverse Primer
actatgggagaaaggtgggc

SEQ ID NO: 2386 - DNA, 20 bp, Artificial Sequence
  HER2 40kb Reverse Primer
ctgcagtactcggcattcct

SEQ ID NO: 2387 - DNA, 20 bp, Artificial Sequence
  HER2 40kb Reverse Primer
atagtctgaagggccccagt

SEQ ID NO: 2388 - DNA, 20 bp, Artificial Sequence
  HER2 40kb Reverse Primer
cttgagccagaaaatgggag

SEQ ID NO: 2389 - DNA, 20 bp, Artificial Sequence
  HER2 40kb Reverse Primer
ggagggtccttatagtgggc

SEQ ID NO: 2390 - DNA, 20 bp, Artificial Sequence
  HER2 40kb Reverse Primer
cgggagctcaactattccct

SEQ ID NO: 2391 - DNA, 20 bp, Artificial Sequence
  HER2 40kb Reverse Primer
attctgggaaccaccctctt

SEQ ID NO: 2392 - DNA, 21 bp, Artificial Sequence
  HER2 40kb Reverse Primer
gagcaggtcctctgtcacttg

SEQ ID NO: 2393 - DNA, 20 bp, Artificial Sequence
  HER2 40kb Reverse Primer
aaagcctagctcaaatgcca

SEQ ID NO: 2394 - DNA, 20 bp, Artificial Sequence
  HER2 40kb Reverse Primer
attgagggctagtttggggt

SEQ ID NO: 2395 - DNA, 20 bp, Artificial Sequence
  HER2 40kb Reverse Primer
caagcaccttcaccttcctc

SEQ ID NO: 2396 - DNA, 20 bp, Artificial Sequence
  HER2 40kb Reverse Primer
tcccggacatggtctaagag

SEQ ID NO: 2397 - DNA, 20 bp, Artificial Sequence
  HER2 40kb Reverse Primer
ttctcccatgggctagacac

SEQ ID NO: 2398 - DNA, 20 bp, Artificial Sequence
  HER2 40kb Reverse Primer
ggtctttccctaatcctggg

SEQ ID NO: 2399 - DNA, 20 bp, Artificial Sequence
  HER2 40kb Reverse Primer
gcctggcatactggactcat

SEQ ID NO: 2400 - DNA, 20 bp, Artificial Sequence
  HER2 40kb Reverse Primer
ggaggtaagcagacagccac

SEQ ID NO: 2401 - DNA, 20 bp, Artificial Sequence
  HER2 40kb Reverse Primer
attcccaggtcaccatcaaa

SEQ ID NO: 2402 - DNA, 20 bp, Artificial Sequence
  HER2 40kb Reverse Primer
gtgtctctgccactccctct

SEQ ID NO: 2403 - DNA, 20 bp, Artificial Sequence
  HER2 40kb Reverse Primer
caagtactcggggttctcca

SEQ ID NO: 2404 - DNA, 20 bp, Artificial Sequence
  HER2 40kb Reverse Primer
ctgggaactcaagcaggaag

SEQ ID NO: 2405 - DNA, 18 bp, Artificial Sequence
  MET Forward Primer
ctgagtcactggcagggc

SEQ ID NO: 2406 - DNA, 20 bp, Artificial Sequence
  MET Forward Primer
aggtaaaattgcagcccctt

SEQ ID NO: 2407 - DNA, 20 bp, Artificial Sequence
  MET Forward Primer
ttatgttggggtccttccaa

SEQ ID NO: 2408 - DNA, 20 bp, Artificial Sequence
  MET Forward Primer
tatgttcaaaggagccctcg

SEQ ID NO: 2409 - DNA, 20 bp, Artificial Sequence
  MET Forward Primer
attgccatgcaaatggattc

SEQ ID NO: 2410 - DNA, 25 bp, Artificial Sequence
  MET Forward Primer
tgtggtgtattcaatgttcattctt

SEQ ID NO: 2411 - DNA, 20 bp, Artificial Sequence
  MET Forward Primer
gccgactactgctttttcaa

SEQ ID NO: 2412 - DNA, 21 bp, Artificial Sequence
  MET Forward Primer
tgccttgcattaatcttgaaa

SEQ ID NO: 2413 - DNA, 20 bp, Artificial Sequence
  MET Forward Primer
caccaaagacatggcaacac

SEQ ID NO: 2414 - DNA, 20 bp, Artificial Sequence
  MET Forward Primer
ctggctggtgtatgctgaaa

SEQ ID NO: 2415 - DNA, 20 bp, Artificial Sequence
  MET Forward Primer
gaaatggaatctgcccttga

SEQ ID NO: 2416 - DNA, 20 bp, Artificial Sequence
  MET Forward Primer
tccttctatcagaaagccca

SEQ ID NO: 2417 - DNA, 24 bp, Artificial Sequence
  MET Forward Primer
tgcataaatgtgtgcaagtatgtt

SEQ ID NO: 2418 - DNA, 21 bp, Artificial Sequence
  MET Forward Primer
aaatctggcatttccacagag

SEQ ID NO: 2419 - DNA, 20 bp, Artificial Sequence
  MET Forward Primer
tgtcttcaaaggtgggcttt

SEQ ID NO: 2420 - DNA, 20 bp, Artificial Sequence
  MET Forward Primer
cgctctccttccttttcctt

SEQ ID NO: 2421 - DNA, 20 bp, Artificial Sequence
  MET Forward Primer
gttcctattggcacgtggtt

SEQ ID NO: 2422 - DNA, 20 bp, Artificial Sequence
  MET Forward Primer
tgactgaacttcacccgttg

SEQ ID NO: 2423 - DNA, 20 bp, Artificial Sequence
  MET Forward Primer
agttggaattctgaggcagc

SEQ ID NO: 2424 - DNA, 20 bp, Artificial Sequence
  MET Forward Primer
taggttttggctttgcttgg

SEQ ID NO: 2425 - DNA, 22 bp, Artificial Sequence
  MET Forward Primer
tcagtgaccttgttcgacaaat

SEQ ID NO: 2426 - DNA, 20 bp, Artificial Sequence
  MET Forward Primer
gctatgcacagaaaaagggc

SEQ ID NO: 2427 - DNA, 20 bp, Artificial Sequence
  MET Forward Primer
aagaatggctgctttggaga

SEQ ID NO: 2428 - DNA, 22 bp, Artificial Sequence
  MET Forward Primer
ttgaaaaatgaatgaatgcctg

SEQ ID NO: 2429 - DNA, 20 bp, Artificial Sequence
  MET Forward Primer
gggagggagggtatggaata

SEQ ID NO: 2430 - DNA, 22 bp, Artificial Sequence
  MET Forward Primer
ttctgagtgtcagaggcatgtt

SEQ ID NO: 2431 - DNA, 20 bp, Artificial Sequence
  MET Forward Primer
tgggatattgtctctgggga

SEQ ID NO: 2432 - DNA, 20 bp, Artificial Sequence
  MET Forward Primer
ccaatggctacactgtccaa

SEQ ID NO: 2433 - DNA, 24 bp, Artificial Sequence
  MET Forward Primer
gaatatgcattttggacttttcaa

SEQ ID NO: 2434 - DNA, 20 bp, Artificial Sequence
  MET Forward Primer
acaatgaaaggtgacagccc

SEQ ID NO: 2435 - DNA, 22 bp, Artificial Sequence
  MET Forward Primer
tttccctgaagttattccttgc

SEQ ID NO: 2436 - DNA, 20 bp, Artificial Sequence
  MET Forward Primer
ttggttctttcccattttgc

SEQ ID NO: 2437 - DNA, 20 bp, Artificial Sequence
  MET Forward Primer
taatcaccagtgccctcctc

SEQ ID NO: 2438 - DNA, 20 bp, Artificial Sequence
  MET Forward Primer
ggttcacaaaccgctctctc

SEQ ID NO: 2439 - DNA, 22 bp, Artificial Sequence
  MET Forward Primer
ccttcctttctttccataatgc

SEQ ID NO: 2440 - DNA, 20 bp, Artificial Sequence
  MET Forward Primer
atccatgtgaagttgagggc

SEQ ID NO: 2441 - DNA, 20 bp, Artificial Sequence
  MET Forward Primer
tgaagtgacactgccctgac

SEQ ID NO: 2442 - DNA, 20 bp, Artificial Sequence
  MET Forward Primer
caaacatgcttcaccaacca

SEQ ID NO: 2443 - DNA, 20 bp, Artificial Sequence
  MET Forward Primer
cccagccactagcagtcttc

SEQ ID NO: 2444 - DNA, 20 bp, Artificial Sequence
  MET Forward Primer
acatctgggtccacaaaagc

SEQ ID NO: 2445 - DNA, 20 bp, Artificial Sequence
  MET Forward Primer
ggagagatggatttcgggat

SEQ ID NO: 2446 - DNA, 20 bp, Artificial Sequence
  MET Forward Primer
gcagctccaacttatcctgc

SEQ ID NO: 2447 - DNA, 20 bp, Artificial Sequence
  MET Forward Primer
tacacacaacctgccctgaa

SEQ ID NO: 2448 - DNA, 20 bp, Artificial Sequence
  MET Forward Primer
ctgtacaaaatgtggccagg

SEQ ID NO: 2449 - DNA, 20 bp, Artificial Sequence
  MET Forward Primer
tcacacctctcccctttgtc

SEQ ID NO: 2450 - DNA, 20 bp, Artificial Sequence
  MET Forward Primer
tcaaatgtgatttgcggatt

SEQ ID NO: 2451 - DNA, 22 bp, Artificial Sequence
  MET Forward Primer
gacaaagatgtttgctgacaga

SEQ ID NO: 2452 - DNA, 20 bp, Artificial Sequence
  MET Forward Primer
gaaaccgtttagagcacccc

SEQ ID NO: 2453 - DNA, 20 bp, Artificial Sequence
  MET Forward Primer
ccacctgccaggaactttta

SEQ ID NO: 2454 - DNA, 20 bp, Artificial Sequence
  MET Forward Primer
atgggaggctgttactgtgg

SEQ ID NO: 2455 - DNA, 20 bp, Artificial Sequence
  MET Forward Primer
ggccaacccatgagatgtat

SEQ ID NO: 2456 - DNA, 20 bp, Artificial Sequence
  MET Forward Primer
attcctcctgtcccttcgat

SEQ ID NO: 2457 - DNA, 20 bp, Artificial Sequence
  MET Forward Primer
caatgggtgctcccaaatac

SEQ ID NO: 2458 - DNA, 23 bp, Artificial Sequence
  MET Forward Primer
catcataaatccctttcttgcac

SEQ ID NO: 2459 - DNA, 20 bp, Artificial Sequence
  MET Forward Primer
caggaccttttcaggagcaa

SEQ ID NO: 2460 - DNA, 20 bp, Artificial Sequence
  MET Forward Primer
gagattctgtttggccttgc

SEQ ID NO: 2461 - DNA, 25 bp, Artificial Sequence
  MET Forward Primer
ccaggaaatgcaaataatttaaaac

SEQ ID NO: 2462 - DNA, 20 bp, Artificial Sequence
  MET Forward Primer
aggaatcggtgtttgaatgc

SEQ ID NO: 2463 - DNA, 20 bp, Artificial Sequence
  MET Forward Primer
agcagggaactcaaagttgg

SEQ ID NO: 2464 - DNA, 20 bp, Artificial Sequence
  MET Forward Primer
cccacgtgactttctgtcct

SEQ ID NO: 2465 - DNA, 22 bp, Artificial Sequence
  MET Forward Primer
tggacatcaactaacatgcaaa

SEQ ID NO: 2466 - DNA, 24 bp, Artificial Sequence
  MET Forward Primer
tccctaatccttttcttctatccc

SEQ ID NO: 2467 - DNA, 20 bp, Artificial Sequence
  MET Forward Primer
aagggctagaatcagagggc

SEQ ID NO: 2468 - DNA, 20 bp, Artificial Sequence
  MET Forward Primer
ttccagtcgagttggtctcc

SEQ ID NO: 2469 - DNA, 20 bp, Artificial Sequence
  MET Forward Primer
tcatcacccattccctcaat

SEQ ID NO: 2470 - DNA, 20 bp, Artificial Sequence
  MET Forward Primer
catgaacacacccattcctg

SEQ ID NO: 2471 - DNA, 20 bp, Artificial Sequence
  MET Forward Primer
tcatttccgcctctgttctt

SEQ ID NO: 2472 - DNA, 20 bp, Artificial Sequence
  MET Forward Primer
actggtctttccattgccag

SEQ ID NO: 2473 - DNA, 20 bp, Artificial Sequence
  MET Forward Primer
atgagccaagcagaccttgt

SEQ ID NO: 2474 - DNA, 20 bp, Artificial Sequence
  MET Forward Primer
gggctatgtcccatttctca

SEQ ID NO: 2475 - DNA, 20 bp, Artificial Sequence
  MET Forward Primer
aacaggcccattcatgtttc

SEQ ID NO: 2476 - DNA, 24 bp, Artificial Sequence
  MET Forward Primer
gccaaattataaccataccattcc

SEQ ID NO: 2477 - DNA, 20 bp, Artificial Sequence
  MET Forward Primer
ccacgttaaacaaccagcaa

SEQ ID NO: 2478 - DNA, 20 bp, Artificial Sequence
  MET Forward Primer
tggggagtgtaaagaggcac

SEQ ID NO: 2479 - DNA, 20 bp, Artificial Sequence
  MET Forward Primer
ccccacaatcatactgctga

SEQ ID NO: 2480 - DNA, 20 bp, Artificial Sequence
  MET Forward Primer
catgcctttgaaagcaacaa

SEQ ID NO: 2481 - DNA, 20 bp, Artificial Sequence
  MET Forward Primer
acaaataggagccagcctga

SEQ ID NO: 2482 - DNA, 27 bp, Artificial Sequence
  MET Forward Primer
gtatcagtctcaaaaagaatatccagg

SEQ ID NO: 2483 - DNA, 20 bp, Artificial Sequence
  MET Forward Primer
tcacagcagcaattcccata

SEQ ID NO: 2484 - DNA, 20 bp, Artificial Sequence
  MET Forward Primer
gcttggcactttacctggtt

SEQ ID NO: 2485 - DNA, 20 bp, Artificial Sequence
  MET Forward Primer
gccagatttggaatacggac

SEQ ID NO: 2486 - DNA, 20 bp, Artificial Sequence
  MET Forward Primer
tgctgaaatgtctgggacac

SEQ ID NO: 2487 - DNA, 20 bp, Artificial Sequence
  MET Forward Primer
tccttatgaagctccccctt

SEQ ID NO: 2488 - DNA, 20 bp, Artificial Sequence
  MET Forward Primer
gaagggtagggcaagaaaaa

SEQ ID NO: 2489 - DNA, 20 bp, Artificial Sequence
  MET Forward Primer
aattcttgcgggaaacaaga

SEQ ID NO: 2490 - DNA, 20 bp, Artificial Sequence
  MET Forward Primer
ttggcatcaagtttggtgaa

SEQ ID NO: 2491 - DNA, 20 bp, Artificial Sequence
  MET Forward Primer
ttgcttttcccagtctcaca

SEQ ID NO: 2492 - DNA, 21 bp, Artificial Sequence
  MET Forward Primer
ttgatcctcacaatgtgtcca

SEQ ID NO: 2493 - DNA, 20 bp, Artificial Sequence
  MET Forward Primer
ggcccatatgtagggagaaa

SEQ ID NO: 2494 - DNA, 20 bp, Artificial Sequence
  MET Forward Primer
agctctcgcctctcagaaaa

SEQ ID NO: 2495 - DNA, 20 bp, Artificial Sequence
  MET Forward Primer
gttgggagacagcatggact

SEQ ID NO: 2496 - DNA, 20 bp, Artificial Sequence
  MET Forward Primer
gaggatggggagaaagacaa

SEQ ID NO: 2497 - DNA, 20 bp, Artificial Sequence
  MET Forward Primer
gccaactgcttcccaaaata

SEQ ID NO: 2498 - DNA, 20 bp, Artificial Sequence
  MET Forward Primer
taattgcagccttccatcag

SEQ ID NO: 2499 - DNA, 20 bp, Artificial Sequence
  MET Forward Primer
gggatgaaaaatgtgaagcc

SEQ ID NO: 2500 - DNA, 20 bp, Artificial Sequence
  MET Forward Primer
gctcagggagtcactgcttc

SEQ ID NO: 2501 - DNA, 21 bp, Artificial Sequence
  MET Forward Primer
gatgaaaaagcaaaggcatga

SEQ ID NO: 2502 - DNA, 20 bp, Artificial Sequence
  MET Forward Primer
tgggatgctgcattgataag

SEQ ID NO: 2503 - DNA, 20 bp, Artificial Sequence
  MET Forward Primer
ggaaaatgaaaccaagggct

SEQ ID NO: 2504 - DNA, 20 bp, Artificial Sequence
  MET Forward Primer
tgccttgggaagcagtttac

SEQ ID NO: 2505 - DNA, 24 bp, Artificial Sequence
  MET Forward Primer
tttgctgagtcatcatctcaaaat

SEQ ID NO: 2506 - DNA, 22 bp, Artificial Sequence
  MET Forward Primer
tgcactaaggagattacaagca

SEQ ID NO: 2507 - DNA, 20 bp, Artificial Sequence
  MET Forward Primer
gcaggagacagaggaaagga

SEQ ID NO: 2508 - DNA, 20 bp, Artificial Sequence
  MET Forward Primer
aaaggctgtcctgaggaggt

SEQ ID NO: 2509 - DNA, 23 bp, Artificial Sequence
  MET Forward Primer
gcaagaagtagtacaatgctgga

SEQ ID NO: 2510 - DNA, 20 bp, Artificial Sequence
  MET Forward Primer
gaccccgtttgtcagaagaa

SEQ ID NO: 2511 - DNA, 22 bp, Artificial Sequence
  MET Forward Primer
gctcacaaggatatcatgagca

SEQ ID NO: 2512 - DNA, 21 bp, Artificial Sequence
  MET Forward Primer
gagaccatctgaattgccaaa

SEQ ID NO: 2513 - DNA, 20 bp, Artificial Sequence
  MET Forward Primer
aaggcgaccagaatcttgag

SEQ ID NO: 2514 - DNA, 20 bp, Artificial Sequence
  MET Forward Primer
tggctccaacatcatggtaa

SEQ ID NO: 2515 - DNA, 20 bp, Artificial Sequence
  MET Forward Primer
catgtacaaagaggacccgc

SEQ ID NO: 2516 - DNA, 22 bp, Artificial Sequence
  MET Forward Primer
caatccaattgaatgcagatga

SEQ ID NO: 2517 - DNA, 20 bp, Artificial Sequence
  MET Forward Primer
tctgttccagtgaatggctg

SEQ ID NO: 2518 - DNA, 22 bp, Artificial Sequence
  MET Forward Primer
ccttcttcaaaataaagcctgg

SEQ ID NO: 2519 - DNA, 20 bp, Artificial Sequence
  MET Forward Primer
gagatggttcaagcacagca

SEQ ID NO: 2520 - DNA, 20 bp, Artificial Sequence
  MET Forward Primer
ccacagtcccagcacctaat

SEQ ID NO: 2521 - DNA, 18 bp, Artificial Sequence
  MET Forward Primer
tacctatgcccctcccgt

SEQ ID NO: 2522 - DNA, 20 bp, Artificial Sequence
  MET Forward Primer
tcaacagcactcaccctttg

SEQ ID NO: 2523 - DNA, 20 bp, Artificial Sequence
  MET Forward Primer
ccacaggatcgtaatcccag

SEQ ID NO: 2524 - DNA, 20 bp, Artificial Sequence
  MET Forward Primer
gcaagatggaaaggagggat

SEQ ID NO: 2525 - DNA, 21 bp, Artificial Sequence
  MET Forward Primer
agtgcagggtaattggtgttg

SEQ ID NO: 2526 - DNA, 20 bp, Artificial Sequence
  MET Forward Primer
tgagccttctccagctgttt

SEQ ID NO: 2527 - DNA, 20 bp, Artificial Sequence
  MET Forward Primer
gcaacggggtgtgtagagtt

SEQ ID NO: 2528 - DNA, 20 bp, Artificial Sequence
  MET Forward Primer
tattgaagccatagggcagg

SEQ ID NO: 2529 - DNA, 20 bp, Artificial Sequence
  MET Forward Primer
attgaaagctctgtgcctcc

SEQ ID NO: 2530 - DNA, 22 bp, Artificial Sequence
  MET Forward Primer
ggtgatacaagtgaactggcaa

SEQ ID NO: 2531 - DNA, 20 bp, Artificial Sequence
  MET Forward Primer
agcctgtagtggttggagga

SEQ ID NO: 2532 - DNA, 20 bp, Artificial Sequence
  MET Forward Primer
gattggaggtgaagaccctg

SEQ ID NO: 2533 - DNA, 20 bp, Artificial Sequence
  MET Forward Primer
ttattggatgcatggggttt

SEQ ID NO: 2534 - DNA, 20 bp, Artificial Sequence
  MET Forward Primer
ccaagaaatgggagggtctt

SEQ ID NO: 2535 - DNA, 20 bp, Artificial Sequence
  MET Forward Primer
gtacaggtgtggctggaagg

SEQ ID NO: 2536 - DNA, 20 bp, Artificial Sequence
  MET Forward Primer
ctcagaacgttgcccagaat

SEQ ID NO: 2537 - DNA, 20 bp, Artificial Sequence
  MET Forward Primer
tgagataaagcaaccccgtc

SEQ ID NO: 2538 - DNA, 19 bp, Artificial Sequence
  MET Forward Primer
gcagcaaatgctggagtgt

SEQ ID NO: 2539 - DNA, 22 bp, Artificial Sequence
  MET Forward Primer
ggagaagacttgaagtgtgcaa

SEQ ID NO: 2540 - DNA, 20 bp, Artificial Sequence
  MET Forward Primer
ccaaccacaaagcaaactga

SEQ ID NO: 2541 - DNA, 20 bp, Artificial Sequence
  MET Forward Primer
tatgtctctggcagcaccac

SEQ ID NO: 2542 - DNA, 21 bp, Artificial Sequence
  MET Forward Primer
tgctatcgaattgctggtaca

SEQ ID NO: 2543 - DNA, 25 bp, Artificial Sequence
  MET Forward Primer
gagcattttaggtggtttttaatca

SEQ ID NO: 2544 - DNA, 21 bp, Artificial Sequence
  MET Forward Primer
tgctctccttttcttccaagg

SEQ ID NO: 2545 - DNA, 20 bp, Artificial Sequence
  MET Forward Primer
tagatagtggggtcagggca

SEQ ID NO: 2546 - DNA, 20 bp, Artificial Sequence
  MET Forward Primer
tcctaacagcaatggggaag

SEQ ID NO: 2547 - DNA, 20 bp, Artificial Sequence
  MET Forward Primer
tctgacttgtgcacctggag

SEQ ID NO: 2548 - DNA, 20 bp, Artificial Sequence
  MET Forward Primer
aggatttgatgccagcactt

SEQ ID NO: 2549 - DNA, 20 bp, Artificial Sequence
  MET Forward Primer
tccttgccattatcctccag

SEQ ID NO: 2550 - DNA, 22 bp, Artificial Sequence
  MET Forward Primer
tccaccttcattaaaggagacc

SEQ ID NO: 2551 - DNA, 20 bp, Artificial Sequence
  MET Forward Primer
ttctcgtccagaatggtgtg

SEQ ID NO: 2552 - DNA, 20 bp, Artificial Sequence
  MET Forward Primer
tggtagggttggatgcaaat

SEQ ID NO: 2553 - DNA, 23 bp, Artificial Sequence
  MET Forward Primer
tggaaatcttgaacttctgtgaa

SEQ ID NO: 2554 - DNA, 20 bp, Artificial Sequence
  MET Forward Primer
aagggcatggtggaattttt

SEQ ID NO: 2555 - DNA, 20 bp, Artificial Sequence
  MET Forward Primer
cctcccacagagacatgcac

SEQ ID NO: 2556 - DNA, 21 bp, Artificial Sequence
  MET Forward Primer
tcgtccattacctcaccaatc

SEQ ID NO: 2557 - DNA, 21 bp, Artificial Sequence
  MET Forward Primer
cgaatgaagcaaaggaaacag

SEQ ID NO: 2558 - DNA, 20 bp, Artificial Sequence
  MET Forward Primer
gtggagcacagatatggcaa

SEQ ID NO: 2559 - DNA, 20 bp, Artificial Sequence
  MET Forward Primer
gcctaatggcaaagttgctt

SEQ ID NO: 2560 - DNA, 20 bp, Artificial Sequence
  MET Forward Primer
ctgcagagccatgtcaatgt

SEQ ID NO: 2561 - DNA, 20 bp, Artificial Sequence
  MET Forward Primer
agtgagtggatcagggatgc

SEQ ID NO: 2562 - DNA, 23 bp, Artificial Sequence
  MET Forward Primer
tgcctcttaactggactagttgg

SEQ ID NO: 2563 - DNA, 20 bp, Artificial Sequence
  MET Forward Primer
tttaaaaacaatgggggagg

SEQ ID NO: 2564 - DNA, 22 bp, Artificial Sequence
  MET Forward Primer
catgtatttcttccccatgtcc

SEQ ID NO: 2565 - DNA, 21 bp, Artificial Sequence
  MET Forward Primer
ctccatgacaaccaaaaggaa

SEQ ID NO: 2566 - DNA, 20 bp, Artificial Sequence
  MET Forward Primer
acctcacttctccatgtgcc

SEQ ID NO: 2567 - DNA, 20 bp, Artificial Sequence
  MET Forward Primer
tgctccaagagcctagcagt

SEQ ID NO: 2568 - DNA, 20 bp, Artificial Sequence
  MET Forward Primer
cagaggtgcaaagagcttcc

SEQ ID NO: 2569 - DNA, 20 bp, Artificial Sequence
  MET Forward Primer
ggggtattgggcaggagtat

SEQ ID NO: 2570 - DNA, 20 bp, Artificial Sequence
  MET Forward Primer
gtttccaacctttcccatcc

SEQ ID NO: 2571 - DNA, 20 bp, Artificial Sequence
  MET Forward Primer
tggctcctttgttatgctga

SEQ ID NO: 2572 - DNA, 20 bp, Artificial Sequence
  MET Forward Primer
tgagaactccaacaccctcc

SEQ ID NO: 2573 - DNA, 20 bp, Artificial Sequence
  MET Forward Primer
agccagaccaagaagcagag

SEQ ID NO: 2574 - DNA, 20 bp, Artificial Sequence
  MET Forward Primer
ttggttcctccattttccaa

SEQ ID NO: 2575 - DNA, 20 bp, Artificial Sequence
  MET Forward Primer
ttctcgatcaggaccatcaa

SEQ ID NO: 2576 - DNA, 20 bp, Artificial Sequence
  MET Forward Primer
cccctcctccattaagttct

SEQ ID NO: 2577 - DNA, 20 bp, Artificial Sequence
  MET Forward Primer
cgactccaaccaataatccc

SEQ ID NO: 2578 - DNA, 20 bp, Artificial Sequence
  MET Forward Primer
gctctttccaccccttctct

SEQ ID NO: 2579 - DNA, 20 bp, Artificial Sequence
  MET Forward Primer
agcaccatctctctcttggc

SEQ ID NO: 2580 - DNA, 20 bp, Artificial Sequence
  MET Forward Primer
tataggccaagtgcccagac

SEQ ID NO: 2581 - DNA, 20 bp, Artificial Sequence
  MET Forward Primer
acacttccctggtgagaacc

SEQ ID NO: 2582 - DNA, 23 bp, Artificial Sequence
  MET Forward Primer
gcttgattgaccagagaataaac

SEQ ID NO: 2583 - DNA, 20 bp, Artificial Sequence
  MET Forward Primer
ccctcctctctcacccttct

SEQ ID NO: 2584 - DNA, 20 bp, Artificial Sequence
  MET Forward Primer
catttcctgcccacagagtt

SEQ ID NO: 2585 - DNA, 19 bp, Artificial Sequence
  MET Forward Primer
ctattgccagtgccccagt

SEQ ID NO: 2586 - DNA, 20 bp, Artificial Sequence
  MET Forward Primer
gaagagagtcctgggagggt

SEQ ID NO: 2587 - DNA, 20 bp, Artificial Sequence
  MET Forward Primer
ttgaatttggctaaaagccc

SEQ ID NO: 2588 - DNA, 20 bp, Artificial Sequence
  MET Forward Primer
aggtgcctaatgcggtctta

SEQ ID NO: 2589 - DNA, 21 bp, Artificial Sequence
  MET Forward Primer
gaaatttgtgacccttttccc

SEQ ID NO: 2590 - DNA, 20 bp, Artificial Sequence
  MET Forward Primer
cttaaaatgctttgctgggg

SEQ ID NO: 2591 - DNA, 20 bp, Artificial Sequence
  MET Forward Primer
tgcgacaagtcttcaggtgt

SEQ ID NO: 2592 - DNA, 20 bp, Artificial Sequence
  MET Forward Primer
ggcactgcaatatatgggct

SEQ ID NO: 2593 - DNA, 21 bp, Artificial Sequence
  MET Forward Primer
tttgttagctgaatggcaaaa

SEQ ID NO: 2594 - DNA, 23 bp, Artificial Sequence
  MET Forward Primer
aaccacagaaatgtacctgttga

SEQ ID NO: 2595 - DNA, 20 bp, Artificial Sequence
  MET Forward Primer
ttgaaatgcacagttggtcc

SEQ ID NO: 2596 - DNA, 20 bp, Artificial Sequence
  MET Forward Primer
atacggtcctatggctggtg

SEQ ID NO: 2597 - DNA, 21 bp, Artificial Sequence
  MET Forward Primer
ttcctccttccaaaattcatc

SEQ ID NO: 2598 - DNA, 20 bp, Artificial Sequence
  MET Forward Primer
aagaaatggggaaaattggg

SEQ ID NO: 2599 - DNA, 20 bp, Artificial Sequence
  MET Forward Primer
tgaatgttataccccagccc

SEQ ID NO: 2600 - DNA, 20 bp, Artificial Sequence
  MET Forward Primer
ggcttctttccaattcagga

SEQ ID NO: 2601 - DNA, 20 bp, Artificial Sequence
  MET Forward Primer
cccagttcaatctgccttgt

SEQ ID NO: 2602 - DNA, 20 bp, Artificial Sequence
  MET Forward Primer
ttgactgtgcctctgacctg

SEQ ID NO: 2603 - DNA, 20 bp, Artificial Sequence
  MET Forward Primer
tgcatctttgcctctaacca

SEQ ID NO: 2604 - DNA, 21 bp, Artificial Sequence
  MET Forward Primer
ttgctgtttctccacctatcc

SEQ ID NO: 2605 - DNA, 20 bp, Artificial Sequence
  MET Forward Primer
caaaaaccaatttggggcta

SEQ ID NO: 2606 - DNA, 22 bp, Artificial Sequence
  MET Forward Primer
aaaggacatcagttctccacaa

SEQ ID NO: 2607 - DNA, 25 bp, Artificial Sequence
  MET Forward Primer
caaacaatggtagacgataaaaatc

SEQ ID NO: 2608 - DNA, 20 bp, Artificial Sequence
  MET Forward Primer
accatgatgaattgaaccca

SEQ ID NO: 2609 - DNA, 26 bp, Artificial Sequence
  MET Forward Primer
ccatcaggaataaataacttttagca

SEQ ID NO: 2610 - DNA, 20 bp, Artificial Sequence
  MET Forward Primer
tgtttgtcttttccttgggg

SEQ ID NO: 2611 - DNA, 20 bp, Artificial Sequence
  MET Forward Primer
gcatgggagtgaagacactg

SEQ ID NO: 2612 - DNA, 20 bp, Artificial Sequence
  MET Forward Primer
tggtgcttggtgctttacaa

SEQ ID NO: 2613 - DNA, 20 bp, Artificial Sequence
  MET Forward Primer
agatgaaggccagcttcaga

SEQ ID NO: 2614 - DNA, 20 bp, Artificial Sequence
  MET Forward Primer
ggcatgtcaacatcgctcta

SEQ ID NO: 2615 - DNA, 22 bp, Artificial Sequence
  MET Forward Primer
caattgttgtacttggccattg

SEQ ID NO: 2616 - DNA, 23 bp, Artificial Sequence
  MET Forward Primer
gagctgtgaaagtaaatgcatca

SEQ ID NO: 2617 - DNA, 20 bp, Artificial Sequence
  MET Forward Primer
cacaggcaaaatgctcaaga

SEQ ID NO: 2618 - DNA, 21 bp, Artificial Sequence
  MET Forward Primer
ttaagcaagcccagcataaaa

SEQ ID NO: 2619 - DNA, 26 bp, Artificial Sequence
  MET Forward Primer
tgtgcaaatagttttacactcacaga

SEQ ID NO: 2620 - DNA, 20 bp, Artificial Sequence
  MET Forward Primer
catggcgaaagggtcttcta

SEQ ID NO: 2621 - DNA, 20 bp, Artificial Sequence
  MET Forward Primer
tgactacaccatgggcaaaa

SEQ ID NO: 2622 - DNA, 20 bp, Artificial Sequence
  MET Forward Primer
gtcacccaggaagcaaagag

SEQ ID NO: 2623 - DNA, 20 bp, Artificial Sequence
  MET Forward Primer
tgtttcatgctggaacaagg

SEQ ID NO: 2624 - DNA, 20 bp, Artificial Sequence
  MET Forward Primer
ggcattggaaggatcaaaaa

SEQ ID NO: 2625 - DNA, 20 bp, Artificial Sequence
  MET Forward Primer
ttaattttggtttgcccagc

SEQ ID NO: 2626 - DNA, 20 bp, Artificial Sequence
  MET Forward Primer
gtactgacttgcccagaccc

SEQ ID NO: 2627 - DNA, 20 bp, Artificial Sequence
  MET Forward Primer
tggatccattttgacattgc

SEQ ID NO: 2628 - DNA, 21 bp, Artificial Sequence
  MET Forward Primer
gactgaaatcaccctgaagca

SEQ ID NO: 2629 - DNA, 20 bp, Artificial Sequence
  MET Forward Primer
cagggagatcctaagcctga

SEQ ID NO: 2630 - DNA, 21 bp, Artificial Sequence
  MET Forward Primer
tcgtttgaagccctaaagtca

SEQ ID NO: 2631 - DNA, 20 bp, Artificial Sequence
  MET Forward Primer
gtgaatggagtttgccgagt

SEQ ID NO: 2632 - DNA, 21 bp, Artificial Sequence
  MET Forward Primer
ggactcaagtgtgcaagaagg

SEQ ID NO: 2633 - DNA, 20 bp, Artificial Sequence
  MET Forward Primer
cctgaggacaatggtgaggt

SEQ ID NO: 2634 - DNA, 20 bp, Artificial Sequence
  MET Forward Primer
tgccattgttagcattcctg

SEQ ID NO: 2635 - DNA, 20 bp, Artificial Sequence
  MET Forward Primer
atcaactcagcctgcattcc

SEQ ID NO: 2636 - DNA, 23 bp, Artificial Sequence
  MET Forward Primer
aaatcaaaggctgaatcatgaga

SEQ ID NO: 2637 - DNA, 20 bp, Artificial Sequence
  MET Forward Primer
tgtcccattgtctctgttga

SEQ ID NO: 2638 - DNA, 19 bp, Artificial Sequence
  MET Forward Primer
cctgaaggcagttatgcca

SEQ ID NO: 2639 - DNA, 20 bp, Artificial Sequence
  MET Forward Primer
ggtttttcctgtggctgaaa

SEQ ID NO: 2640 - DNA, 22 bp, Artificial Sequence
  MET Forward Primer
tgttttaagatctgggcagtga

SEQ ID NO: 2641 - DNA, 22 bp, Artificial Sequence
  MET Forward Primer
gcgaagctctcttttacaatcc

SEQ ID NO: 2642 - DNA, 20 bp, Artificial Sequence
  MET Forward Primer
caagcatttccttggttgaa

SEQ ID NO: 2643 - DNA, 20 bp, Artificial Sequence
  MET Forward Primer
ccgtgtggaaaaatcaaacc

SEQ ID NO: 2644 - DNA, 20 bp, Artificial Sequence
  MET Forward Primer
cttttctccattgagcctgc

SEQ ID NO: 2645 - DNA, 20 bp, Artificial Sequence
  MET Forward Primer
ctcaccaaggatttccctca

SEQ ID NO: 2646 - DNA, 20 bp, Artificial Sequence
  MET Forward Primer
ccacttttggccaagttcat

SEQ ID NO: 2647 - DNA, 20 bp, Artificial Sequence
  MET Forward Primer
aaagggaaagtggaaatgcc

SEQ ID NO: 2648 - DNA, 20 bp, Artificial Sequence
  MET Forward Primer
catcactgcacagtggagaa

SEQ ID NO: 2649 - DNA, 23 bp, Artificial Sequence
  MET Forward Primer
cactgcttccattcttaaggaca

SEQ ID NO: 2650 - DNA, 20 bp, Artificial Sequence
  MET Forward Primer
tcttcctgtttcagtcccca

SEQ ID NO: 2651 - DNA, 20 bp, Artificial Sequence
  MET Forward Primer
tttggcctttgcagattagg

SEQ ID NO: 2652 - DNA, 20 bp, Artificial Sequence
  MET Forward Primer
acactgctggacagcatcag

SEQ ID NO: 2653 - DNA, 20 bp, Artificial Sequence
  MET Forward Primer
aatggcctctgatccctttt

SEQ ID NO: 2654 - DNA, 23 bp, Artificial Sequence
  MET Forward Primer
tcccagtaattgcatcaatttta

SEQ ID NO: 2655 - DNA, 20 bp, Artificial Sequence
  MET Forward Primer
gcagcctaatgcctgacact

SEQ ID NO: 2656 - DNA, 20 bp, Artificial Sequence
  MET Forward Primer
ttctgccaacctggattacg

SEQ ID NO: 2657 - DNA, 26 bp, Artificial Sequence
  MET Forward Primer
tggttgaatattttattaggttaggc

SEQ ID NO: 2658 - DNA, 20 bp, Artificial Sequence
  MET Forward Primer
ttctttcttttgcacagggc

SEQ ID NO: 2659 - DNA, 20 bp, Artificial Sequence
  MET Forward Primer
tattggaagcatgttggcac

SEQ ID NO: 2660 - DNA, 21 bp, Artificial Sequence
  MET Forward Primer
cctacccctttttaatgctgg

SEQ ID NO: 2661 - DNA, 20 bp, Artificial Sequence
  MET Forward Primer
aaattgcagcagcctgaaaa

SEQ ID NO: 2662 - DNA, 20 bp, Artificial Sequence
  MET Forward Primer
aaaagtgggcataggtggtg

SEQ ID NO: 2663 - DNA, 20 bp, Artificial Sequence
  MET Forward Primer
ttctgaccgagggaatcatc

SEQ ID NO: 2664 - DNA, 20 bp, Artificial Sequence
  MET Forward Primer
gaagggtttcctggagcaat

SEQ ID NO: 2665 - DNA, 20 bp, Artificial Sequence
  MET Forward Primer
tggaagctcatgagggtagg

SEQ ID NO: 2666 - DNA, 25 bp, Artificial Sequence
  MET Forward Primer
gggaataagaatctcaagaactgaa

SEQ ID NO: 2667 - DNA, 20 bp, Artificial Sequence
  MET Forward Primer
ttacaaagcacacagctgcc

SEQ ID NO: 2668 - DNA, 20 bp, Artificial Sequence
  MET Forward Primer
ctacagcccttttgcagggt

SEQ ID NO: 2669 - DNA, 20 bp, Artificial Sequence
  MET Forward Primer
ggcttgagccattaagacca

SEQ ID NO: 2670 - DNA, 20 bp, Artificial Sequence
  MET Forward Primer
gatgtgggtgggactttcag

SEQ ID NO: 2671 - DNA, 20 bp, Artificial Sequence
  MET Forward Primer
tggctgcctggctatgtaat

SEQ ID NO: 2672 - DNA, 20 bp, Artificial Sequence
  MET Forward Primer
atcagtcccctgtcatgctc

SEQ ID NO: 2673 - DNA, 24 bp, Artificial Sequence
  MET Forward Primer
tgttagtcaatagaggccagatga

SEQ ID NO: 2674 - DNA, 21 bp, Artificial Sequence
  MET Forward Primer
acaacaaaacaggtgcaaagc

SEQ ID NO: 2675 - DNA, 20 bp, Artificial Sequence
  MET Forward Primer
ttggctcagaagggaagaga

SEQ ID NO: 2676 - DNA, 20 bp, Artificial Sequence
  MET Forward Primer
gaaatactcacctgggcagc

SEQ ID NO: 2677 - DNA, 20 bp, Artificial Sequence
  MET Forward Primer
ggctgggaatatgcttttga

SEQ ID NO: 2678 - DNA, 20 bp, Artificial Sequence
  MET Forward Primer
gagcacaggtgttgaatgga

SEQ ID NO: 2679 - DNA, 21 bp, Artificial Sequence
  MET Forward Primer
ctctgtgaatcagcaagaggg

SEQ ID NO: 2680 - DNA, 21 bp, Artificial Sequence
  MET Forward Primer
tgtagagcttaatgcctggga

SEQ ID NO: 2681 - DNA, 20 bp, Artificial Sequence
  MET Forward Primer
ttccaccatagccacagtca

SEQ ID NO: 2682 - DNA, 20 bp, Artificial Sequence
  MET Forward Primer
acaccctcctctgaaccctt

SEQ ID NO: 2683 - DNA, 20 bp, Artificial Sequence
  MET Forward Primer
tcctcaatggcttctcttcc

SEQ ID NO: 2684 - DNA, 20 bp, Artificial Sequence
  MET Forward Primer
tgcctatcatccttccttgc

SEQ ID NO: 2685 - DNA, 20 bp, Artificial Sequence
  MET Forward Primer
gaactttggcttcctcatcc

SEQ ID NO: 2686 - DNA, 20 bp, Artificial Sequence
  MET Forward Primer
aaaactctccctctgccctc

SEQ ID NO: 2687 - DNA, 20 bp, Artificial Sequence
  MET Forward Primer
attcagccctgggacctatc

SEQ ID NO: 2688 - DNA, 20 bp, Artificial Sequence
  MET Forward Primer
ccatcaagggttcttgcact

SEQ ID NO: 2689 - DNA, 20 bp, Artificial Sequence
  MET Forward Primer
ctcgtgtcattcttgcatgg

SEQ ID NO: 2690 - DNA, 20 bp, Artificial Sequence
  MET Forward Primer
cttgttgccttgcagttttt

SEQ ID NO: 2691 - DNA, 20 bp, Artificial Sequence
  MET Forward Primer
ttagtgctttgacacagcgg

SEQ ID NO: 2692 - DNA, 20 bp, Artificial Sequence
  MET Forward Primer
actagtggtcctttggcgtg

SEQ ID NO: 2693 - DNA, 20 bp, Artificial Sequence
  MET Forward Primer
aatgctaaaatgctggcacc

SEQ ID NO: 2694 - DNA, 21 bp, Artificial Sequence
  MET Forward Primer
ccacactttgtccaatggttt

SEQ ID NO: 2695 - DNA, 20 bp, Artificial Sequence
  MET Forward Primer
atgggaaattgaagcaggaa

SEQ ID NO: 2696 - DNA, 26 bp, Artificial Sequence
  MET Forward Primer
tttagttgtcatataaaaacccactg

SEQ ID NO: 2697 - DNA, 20 bp, Artificial Sequence
  MET Forward Primer
gggtggatggattgaaaaga

SEQ ID NO: 2698 - DNA, 21 bp, Artificial Sequence
  MET Forward Primer
tgtggaattttgtgcttgcta

SEQ ID NO: 2699 - DNA, 20 bp, Artificial Sequence
  MET Forward Primer
accccaccctcattacatca

SEQ ID NO: 2700 - DNA, 20 bp, Artificial Sequence
  MET Forward Primer
gtcaagagcatgaacgcatc

SEQ ID NO: 2701 - DNA, 20 bp, Artificial Sequence
  MET Forward Primer
atccccgaatctcaggaagt

SEQ ID NO: 2702 - DNA, 19 bp, Artificial Sequence
  MET Reverse Primer
gcctcctctcagcaagtca

SEQ ID NO: 2703 - DNA, 20 bp, Artificial Sequence
  MET Reverse Primer
catcagaagcaaccccctaa

SEQ ID NO: 2704 - DNA, 20 bp, Artificial Sequence
  MET Reverse Primer
atcgggtcagcactacgact

SEQ ID NO: 2705 - DNA, 20 bp, Artificial Sequence
  MET Reverse Primer
aagcgacagaataaaccccc

SEQ ID NO: 2706 - DNA, 22 bp, Artificial Sequence
  MET Reverse Primer
gcttagatcaaggaaggaaagc

SEQ ID NO: 2707 - DNA, 20 bp, Artificial Sequence
  MET Reverse Primer
tgccacaaattccatcatgt

SEQ ID NO: 2708 - DNA, 20 bp, Artificial Sequence
  MET Reverse Primer
cctgcttagcaaagggtcat

SEQ ID NO: 2709 - DNA, 21 bp, Artificial Sequence
  MET Reverse Primer
cacgttgttttgagatgacca

SEQ ID NO: 2710 - DNA, 20 bp, Artificial Sequence
  MET Reverse Primer
gaaagcgtagatggctctgg

SEQ ID NO: 2711 - DNA, 20 bp, Artificial Sequence
  MET Reverse Primer
ggtcaggcaaatgtggatct

SEQ ID NO: 2712 - DNA, 21 bp, Artificial Sequence
  MET Reverse Primer
tgcagaaacagcttgaaaatg

SEQ ID NO: 2713 - DNA, 20 bp, Artificial Sequence
  MET Reverse Primer
ctcctgctacaaatgccaca

SEQ ID NO: 2714 - DNA, 20 bp, Artificial Sequence
  MET Reverse Primer
ttggagtacaggaacctggc

SEQ ID NO: 2715 - DNA, 21 bp, Artificial Sequence
  MET Reverse Primer
ttcaatcaccatcccactctc

SEQ ID NO: 2716 - DNA, 20 bp, Artificial Sequence
  MET Reverse Primer
gcaggcactgtccaggtatt

SEQ ID NO: 2717 - DNA, 20 bp, Artificial Sequence
  MET Reverse Primer
tctaatcacgccaagcagtg

SEQ ID NO: 2718 - DNA, 20 bp, Artificial Sequence
  MET Reverse Primer
tccaaagggggagtttatcc

SEQ ID NO: 2719 - DNA, 20 bp, Artificial Sequence
  MET Reverse Primer
aacacagtggccttctggag

SEQ ID NO: 2720 - DNA, 22 bp, Artificial Sequence
  MET Reverse Primer
tttctctgacttgcaaagacca

SEQ ID NO: 2721 - DNA, 20 bp, Artificial Sequence
  MET Reverse Primer
tggaacaaaaaggccttaca

SEQ ID NO: 2722 - DNA, 19 bp, Artificial Sequence
  MET Reverse Primer
gggaggaaggatgacagga

SEQ ID NO: 2723 - DNA, 20 bp, Artificial Sequence
  MET Reverse Primer
tttcccccgacacaatagag

SEQ ID NO: 2724 - DNA, 20 bp, Artificial Sequence
  MET Reverse Primer
ccgccccctcaagatataag

SEQ ID NO: 2725 - DNA, 19 bp, Artificial Sequence
  MET Reverse Primer
gtgcactcaagcccatgac

SEQ ID NO: 2726 - DNA, 20 bp, Artificial Sequence
  MET Reverse Primer
tggtaactgaggggaggaca

SEQ ID NO: 2727 - DNA, 20 bp, Artificial Sequence
  MET Reverse Primer
acttttggtcccaacaggaa

SEQ ID NO: 2728 - DNA, 20 bp, Artificial Sequence
  MET Reverse Primer
taagaccctcagaggagcca

SEQ ID NO: 2729 - DNA, 22 bp, Artificial Sequence
  MET Reverse Primer
tgtcaacaatctctgctttggt

SEQ ID NO: 2730 - DNA, 21 bp, Artificial Sequence
  MET Reverse Primer
tctgcacttttctggtgattt

SEQ ID NO: 2731 - DNA, 23 bp, Artificial Sequence
  MET Reverse Primer
tcctctcttttcaataaagccaa

SEQ ID NO: 2732 - DNA, 22 bp, Artificial Sequence
  MET Reverse Primer
caatgtccattctcattgaacg

SEQ ID NO: 2733 - DNA, 20 bp, Artificial Sequence
  MET Reverse Primer
ggaaacaactgggcttgtgt

SEQ ID NO: 2734 - DNA, 21 bp, Artificial Sequence
  MET Reverse Primer
gaggaattcagatggagcctt

SEQ ID NO: 2735 - DNA, 21 bp, Artificial Sequence
  MET Reverse Primer
tgaaaagccaagaatggctaa

SEQ ID NO: 2736 - DNA, 20 bp, Artificial Sequence
  MET Reverse Primer
catcaaacctgtcttcccct

SEQ ID NO: 2737 - DNA, 20 bp, Artificial Sequence
  MET Reverse Primer
ttggcagagcttacaaacca

SEQ ID NO: 2738 - DNA, 20 bp, Artificial Sequence
  MET Reverse Primer
accaagaaggagcagttgga

SEQ ID NO: 2739 - DNA, 20 bp, Artificial Sequence
  MET Reverse Primer
gtggccgaattctggttcta

SEQ ID NO: 2740 - DNA, 20 bp, Artificial Sequence
  MET Reverse Primer
gccagtaagcctggactttg

SEQ ID NO: 2741 - DNA, 20 bp, Artificial Sequence
  MET Reverse Primer
aaacaaaacccaacacccct

SEQ ID NO: 2742 - DNA, 20 bp, Artificial Sequence
  MET Reverse Primer
agacactttgggtggagtgg

SEQ ID NO: 2743 - DNA, 20 bp, Artificial Sequence
  MET Reverse Primer
tccaaccatacaggtgttgc

SEQ ID NO: 2744 - DNA, 25 bp, Artificial Sequence
  MET Reverse Primer
aaaagaatagagaatgctgagcaaa

SEQ ID NO: 2745 - DNA, 21 bp, Artificial Sequence
  MET Reverse Primer
tgcttatttgctcacacctga

SEQ ID NO: 2746 - DNA, 20 bp, Artificial Sequence
  MET Reverse Primer
tcggcataaagcatggtaca

SEQ ID NO: 2747 - DNA, 20 bp, Artificial Sequence
  MET Reverse Primer
cattgcccttgaaagtgtga

SEQ ID NO: 2748 - DNA, 20 bp, Artificial Sequence
  MET Reverse Primer
tttgcatcccctcttagtcc

SEQ ID NO: 2749 - DNA, 20 bp, Artificial Sequence
  MET Reverse Primer
tgtggcagcctgtcatttac

SEQ ID NO: 2750 - DNA, 20 bp, Artificial Sequence
  MET Reverse Primer
ctagtcgtcagcaaatgggg

SEQ ID NO: 2751 - DNA, 20 bp, Artificial Sequence
  MET Reverse Primer
cacagtcccttgggtgagac

SEQ ID NO: 2752 - DNA, 20 bp, Artificial Sequence
  MET Reverse Primer
tgcattcaactgctctttgg

SEQ ID NO: 2753 - DNA, 20 bp, Artificial Sequence
  MET Reverse Primer
ggatagatccactgggctga

SEQ ID NO: 2754 - DNA, 21 bp, Artificial Sequence
  MET Reverse Primer
tgccagagtgaaatcttaggg

SEQ ID NO: 2755 - DNA, 22 bp, Artificial Sequence
  MET Reverse Primer
tttcactttgcatttgagaaca

SEQ ID NO: 2756 - DNA, 20 bp, Artificial Sequence
  MET Reverse Primer
cagcctgagcatgaaactga

SEQ ID NO: 2757 - DNA, 20 bp, Artificial Sequence
  MET Reverse Primer
ccttcccagaatccactgtc

SEQ ID NO: 2758 - DNA, 21 bp, Artificial Sequence
  MET Reverse Primer
tggtcagctccatcatctctt

SEQ ID NO: 2759 - DNA, 20 bp, Artificial Sequence
  MET Reverse Primer
ccagcgacttaatctgtcca

SEQ ID NO: 2760 - DNA, 20 bp, Artificial Sequence
  MET Reverse Primer
tctggctgtgtgagcatttt

SEQ ID NO: 2761 - DNA, 20 bp, Artificial Sequence
  MET Reverse Primer
tattgttcgtacatggcccc

SEQ ID NO: 2762 - DNA, 21 bp, Artificial Sequence
  MET Reverse Primer
ccatctagagcacaatgggaa

SEQ ID NO: 2763 - DNA, 20 bp, Artificial Sequence
  MET Reverse Primer
gcaatcacccacctctgagt

SEQ ID NO: 2764 - DNA, 20 bp, Artificial Sequence
  MET Reverse Primer
ccaccctgtgaagaaggaag

SEQ ID NO: 2765 - DNA, 21 bp, Artificial Sequence
  MET Reverse Primer
tcaaagggaagacaagcaaaa

SEQ ID NO: 2766 - DNA, 20 bp, Artificial Sequence
  MET Reverse Primer
ggggatacccacagttgaga

SEQ ID NO: 2767 - DNA, 20 bp, Artificial Sequence
  MET Reverse Primer
aaagcggcatgatcagtctt

SEQ ID NO: 2768 - DNA, 20 bp, Artificial Sequence
  MET Reverse Primer
gcactgggaagttaggctga

SEQ ID NO: 2769 - DNA, 19 bp, Artificial Sequence
  MET Reverse Primer
tagccaaaatttgcgtcca

SEQ ID NO: 2770 - DNA, 20 bp, Artificial Sequence
  MET Reverse Primer
ctgcaatgtggctgagtgat

SEQ ID NO: 2771 - DNA, 20 bp, Artificial Sequence
  MET Reverse Primer
tggaaaggagaggccttaga

SEQ ID NO: 2772 - DNA, 20 bp, Artificial Sequence
  MET Reverse Primer
ggaactgaaaaacaggaggc

SEQ ID NO: 2773 - DNA, 25 bp, Artificial Sequence
  MET Reverse Primer
tgttagtcaagtaaaggaactgtgg

SEQ ID NO: 2774 - DNA, 20 bp, Artificial Sequence
  MET Reverse Primer
cataaagatgcattgtgcgg

SEQ ID NO: 2775 - DNA, 20 bp, Artificial Sequence
  MET Reverse Primer
aacaatctgggtgttccagc

SEQ ID NO: 2776 - DNA, 20 bp, Artificial Sequence
  MET Reverse Primer
cgaatgcaatggatgatctg

SEQ ID NO: 2777 - DNA, 20 bp, Artificial Sequence
  MET Reverse Primer
ctgacatacgcagcctgaag

SEQ ID NO: 2778 - DNA, 20 bp, Artificial Sequence
  MET Reverse Primer
agcagtgctcatgattgggt

SEQ ID NO: 2779 - DNA, 21 bp, Artificial Sequence
  MET Reverse Primer
tctgaaatgtcacgaacatgc

SEQ ID NO: 2780 - DNA, 22 bp, Artificial Sequence
  MET Reverse Primer
ccagcatttcagaagaggtttt

SEQ ID NO: 2781 - DNA, 22 bp, Artificial Sequence
  MET Reverse Primer
gccacaataaacactcagacca

SEQ ID NO: 2782 - DNA, 20 bp, Artificial Sequence
  MET Reverse Primer
gcctttacccctcagcaaat

SEQ ID NO: 2783 - DNA, 25 bp, Artificial Sequence
  MET Reverse Primer
aaatgtatgtagggggaaataagtc

SEQ ID NO: 2784 - DNA, 20 bp, Artificial Sequence
  MET Reverse Primer
tctaggagccctggaggaat

SEQ ID NO: 2785 - DNA, 21 bp, Artificial Sequence
  MET Reverse Primer
ctgacctgaatttcattggct

SEQ ID NO: 2786 - DNA, 20 bp, Artificial Sequence
  MET Reverse Primer
tctgaggtctggatggggta

SEQ ID NO: 2787 - DNA, 20 bp, Artificial Sequence
  MET Reverse Primer
ggtggagagctcttggagtg

SEQ ID NO: 2788 - DNA, 20 bp, Artificial Sequence
  MET Reverse Primer
tggcttgggataagtttcca

SEQ ID NO: 2789 - DNA, 23 bp, Artificial Sequence
  MET Reverse Primer
tgcattagcctaaaacaacttca

SEQ ID NO: 2790 - DNA, 21 bp, Artificial Sequence
  MET Reverse Primer
ctcatttgtaggagattgggc

SEQ ID NO: 2791 - DNA, 20 bp, Artificial Sequence
  MET Reverse Primer
taaaccaggacttccaccca

SEQ ID NO: 2792 - DNA, 20 bp, Artificial Sequence
  MET Reverse Primer
attttgtgccaaggaccaag

SEQ ID NO: 2793 - DNA, 21 bp, Artificial Sequence
  MET Reverse Primer
caaggaagcccaatacaaaca

SEQ ID NO: 2794 - DNA, 26 bp, Artificial Sequence
  MET Reverse Primer
catcactgtatgtttatttttctgcc

SEQ ID NO: 2795 - DNA, 20 bp, Artificial Sequence
  MET Reverse Primer
aataaggcatgccaaaccag

SEQ ID NO: 2796 - DNA, 22 bp, Artificial Sequence
  MET Reverse Primer
cctcaaggattttctttcttgc

SEQ ID NO: 2797 - DNA, 20 bp, Artificial Sequence
  MET Reverse Primer
ggaagggaaaaagcaaaagg

SEQ ID NO: 2798 - DNA, 20 bp, Artificial Sequence
  MET Reverse Primer
ccacctgcttgaaaggacat

SEQ ID NO: 2799 - DNA, 20 bp, Artificial Sequence
  MET Reverse Primer
agtggcagaaattcctggag

SEQ ID NO: 2800 - DNA, 20 bp, Artificial Sequence
  MET Reverse Primer
gaagtcaacatggctcagca

SEQ ID NO: 2801 - DNA, 20 bp, Artificial Sequence
  MET Reverse Primer
tcatttttccccatttgtga

SEQ ID NO: 2802 - DNA, 20 bp, Artificial Sequence
  MET Reverse Primer
attttccccatttcctgagc

SEQ ID NO: 2803 - DNA, 20 bp, Artificial Sequence
  MET Reverse Primer
tgattacaaggttttggccc

SEQ ID NO: 2804 - DNA, 20 bp, Artificial Sequence
  MET Reverse Primer
ttccctcacagcacatttca

SEQ ID NO: 2805 - DNA, 21 bp, Artificial Sequence
  MET Reverse Primer
tgcactaatgaccacaaacca

SEQ ID NO: 2806 - DNA, 20 bp, Artificial Sequence
  MET Reverse Primer
ccaggaaaggcagtgagtgt

SEQ ID NO: 2807 - DNA, 20 bp, Artificial Sequence
  MET Reverse Primer
cagtgcacagaggcagaaag

SEQ ID NO: 2808 - DNA, 20 bp, Artificial Sequence
  MET Reverse Primer
catgacaaagtgccttccct

SEQ ID NO: 2809 - DNA, 20 bp, Artificial Sequence
  MET Reverse Primer
aagcctcctattcccttgga

SEQ ID NO: 2810 - DNA, 20 bp, Artificial Sequence
  MET Reverse Primer
gccccaggatcacctaattt

SEQ ID NO: 2811 - DNA, 20 bp, Artificial Sequence
  MET Reverse Primer
gcatgcccaactctacttga

SEQ ID NO: 2812 - DNA, 20 bp, Artificial Sequence
  MET Reverse Primer
acaaatggagacaggaggca

SEQ ID NO: 2813 - DNA, 20 bp, Artificial Sequence
  MET Reverse Primer
gaaccaccagcatacagggt

SEQ ID NO: 2814 - DNA, 20 bp, Artificial Sequence
  MET Reverse Primer
gagggttttctgagccactg

SEQ ID NO: 2815 - DNA, 20 bp, Artificial Sequence
  MET Reverse Primer
gattgggtggagttgaggag

SEQ ID NO: 2816 - DNA, 20 bp, Artificial Sequence
  MET Reverse Primer
atgtcctggggaaggaaaat

SEQ ID NO: 2817 - DNA, 20 bp, Artificial Sequence
  MET Reverse Primer
agctcttgaaaactccccaa

SEQ ID NO: 2818 - DNA, 21 bp, Artificial Sequence
  MET Reverse Primer
gggagcagagaaagtattccc

SEQ ID NO: 2819 - DNA, 20 bp, Artificial Sequence
  MET Reverse Primer
ggcctcttttccttaaccca

SEQ ID NO: 2820 - DNA, 20 bp, Artificial Sequence
  MET Reverse Primer
ctgctccccttgtttctgat

SEQ ID NO: 2821 - DNA, 20 bp, Artificial Sequence
  MET Reverse Primer
cttggaggtggtaagagcca

SEQ ID NO: 2822 - DNA, 21 bp, Artificial Sequence
  MET Reverse Primer
gcagccttcatactgcacttc

SEQ ID NO: 2823 - DNA, 20 bp, Artificial Sequence
  MET Reverse Primer
gtcaatcctggcaaatgctt

SEQ ID NO: 2824 - DNA, 20 bp, Artificial Sequence
  MET Reverse Primer
ggggcaaaatttaagaggct

SEQ ID NO: 2825 - DNA, 20 bp, Artificial Sequence
  MET Reverse Primer
tctctggcaaagcagatcct

SEQ ID NO: 2826 - DNA, 20 bp, Artificial Sequence
  MET Reverse Primer
tggtaatggttttctgggaa

SEQ ID NO: 2827 - DNA, 23 bp, Artificial Sequence
  MET Reverse Primer
caaaatgtttcccctaattaaca

SEQ ID NO: 2828 - DNA, 20 bp, Artificial Sequence
  MET Reverse Primer
taaagggagaggttgagcga

SEQ ID NO: 2829 - DNA, 20 bp, Artificial Sequence
  MET Reverse Primer
agggaggcattgatgagttg

SEQ ID NO: 2830 - DNA, 20 bp, Artificial Sequence
  MET Reverse Primer
actgacacccattccttgct

SEQ ID NO: 2831 - DNA, 20 bp, Artificial Sequence
  MET Reverse Primer
tctgccttgaagcagtctca

SEQ ID NO: 2832 - DNA, 20 bp, Artificial Sequence
  MET Reverse Primer
tcagcttggctctcaaacct

SEQ ID NO: 2833 - DNA, 20 bp, Artificial Sequence
  MET Reverse Primer
caggcactgaggtgggtatt

SEQ ID NO: 2834 - DNA, 20 bp, Artificial Sequence
  MET Reverse Primer
cagggactggcttacagagc

SEQ ID NO: 2835 - DNA, 21 bp, Artificial Sequence
  MET Reverse Primer
ttgcacaatgttggaatagga

SEQ ID NO: 2836 - DNA, 20 bp, Artificial Sequence
  MET Reverse Primer
atcaggccagcagaagaatg

SEQ ID NO: 2837 - DNA, 20 bp, Artificial Sequence
  MET Reverse Primer
tctggtgggtgtgaatgaga

SEQ ID NO: 2838 - DNA, 20 bp, Artificial Sequence
  MET Reverse Primer
ccagagctaagggaatctgc

SEQ ID NO: 2839 - DNA, 21 bp, Artificial Sequence
  MET Reverse Primer
tttcttcattttcagtggcaa

SEQ ID NO: 2840 - DNA, 27 bp, Artificial Sequence
  MET Reverse Primer
agtaagaaattctctattatcatccca

SEQ ID NO: 2841 - DNA, 20 bp, Artificial Sequence
  MET Reverse Primer
tgggggatgagtatggagat

SEQ ID NO: 2842 - DNA, 20 bp, Artificial Sequence
  MET Reverse Primer
tgttcttagtgctccagcga

SEQ ID NO: 2843 - DNA, 20 bp, Artificial Sequence
  MET Reverse Primer
cccttcctcccaattttcat

SEQ ID NO: 2844 - DNA, 20 bp, Artificial Sequence
  MET Reverse Primer
gacctcccacgcaataaaaa

SEQ ID NO: 2845 - DNA, 20 bp, Artificial Sequence
  MET Reverse Primer
tcagcccttgacacaaaggt

SEQ ID NO: 2846 - DNA, 20 bp, Artificial Sequence
  MET Reverse Primer
acttcgctgaattgacccat

SEQ ID NO: 2847 - DNA, 20 bp, Artificial Sequence
  MET Reverse Primer
caggcttcattgtttggctt

SEQ ID NO: 2848 - DNA, 20 bp, Artificial Sequence
  MET Reverse Primer
gtcccttcctaactcctgcc

SEQ ID NO: 2849 - DNA, 23 bp, Artificial Sequence
  MET Reverse Primer
ggcaccaataactacaaaacagc

SEQ ID NO: 2850 - DNA, 22 bp, Artificial Sequence
  MET Reverse Primer
caggctgctataaagagagtgg

SEQ ID NO: 2851 - DNA, 21 bp, Artificial Sequence
  MET Reverse Primer
ggtcaagatggatgagttgga

SEQ ID NO: 2852 - DNA, 20 bp, Artificial Sequence
  MET Reverse Primer
taaaagggggcaaatcaaca

SEQ ID NO: 2853 - DNA, 20 bp, Artificial Sequence
  MET Reverse Primer
ctgatgcgtgacatatccct

SEQ ID NO: 2854 - DNA, 22 bp, Artificial Sequence
  MET Reverse Primer
ttgtttgatccttcaaatgctt

SEQ ID NO: 2855 - DNA, 20 bp, Artificial Sequence
  MET Reverse Primer
gttcccttttgtgtagggca

SEQ ID NO: 2856 - DNA, 20 bp, Artificial Sequence
  MET Reverse Primer
tgtcttccctgccatacaca

SEQ ID NO: 2857 - DNA, 19 bp, Artificial Sequence
  MET Reverse Primer
ccctctcccacgtagctgt

SEQ ID NO: 2858 - DNA, 20 bp, Artificial Sequence
  MET Reverse Primer
taggaacttggagaggcgaa

SEQ ID NO: 2859 - DNA, 20 bp, Artificial Sequence
  MET Reverse Primer
cgggaactgaaggaatttga

SEQ ID NO: 2860 - DNA, 20 bp, Artificial Sequence
  MET Reverse Primer
gcccccaaatctgtaaacct

SEQ ID NO: 2861 - DNA, 24 bp, Artificial Sequence
  MET Reverse Primer
tcgcataaaatagaagaccaacaa

SEQ ID NO: 2862 - DNA, 20 bp, Artificial Sequence
  MET Reverse Primer
ggctgtaccacagatgcaaa

SEQ ID NO: 2863 - DNA, 20 bp, Artificial Sequence
  MET Reverse Primer
ctcgccagttactccgtgtt

SEQ ID NO: 2864 - DNA, 20 bp, Artificial Sequence
  MET Reverse Primer
tcacatattgtgccaagtgc

SEQ ID NO: 2865 - DNA, 21 bp, Artificial Sequence
  MET Reverse Primer
caatcacctcctagagccctt

SEQ ID NO: 2866 - DNA, 20 bp, Artificial Sequence
  MET Reverse Primer
tattggtgacctttgcaggc

SEQ ID NO: 2867 - DNA, 23 bp, Artificial Sequence
  MET Reverse Primer
tgttctcagagagtggattgttg

SEQ ID NO: 2868 - DNA, 20 bp, Artificial Sequence
  MET Reverse Primer
ctcgcgatgggtatgaaatc

SEQ ID NO: 2869 - DNA, 20 bp, Artificial Sequence
  MET Reverse Primer
cgggaaatgaggtttgatga

SEQ ID NO: 2870 - DNA, 20 bp, Artificial Sequence
  MET Reverse Primer
caggcagtttcccttgatgt

SEQ ID NO: 2871 - DNA, 20 bp, Artificial Sequence
  MET Reverse Primer
ggcttgtgggtgtttgaact

SEQ ID NO: 2872 - DNA, 20 bp, Artificial Sequence
  MET Reverse Primer
ggccaagtgacactggttgt

SEQ ID NO: 2873 - DNA, 20 bp, Artificial Sequence
  MET Reverse Primer
tccaggatttatctgcctgc

SEQ ID NO: 2874 - DNA, 20 bp, Artificial Sequence
  MET Reverse Primer
agcatagcattgccacacaa

SEQ ID NO: 2875 - DNA, 20 bp, Artificial Sequence
  MET Reverse Primer
ccttgtagattgcaggcaga

SEQ ID NO: 2876 - DNA, 20 bp, Artificial Sequence
  MET Reverse Primer
ggtgagtcaggagggaacag

SEQ ID NO: 2877 - DNA, 20 bp, Artificial Sequence
  MET Reverse Primer
ctcaccccgggaaataatct

SEQ ID NO: 2878 - DNA, 20 bp, Artificial Sequence
  MET Reverse Primer
caaatcttgctccaaaccgt

SEQ ID NO: 2879 - DNA, 19 bp, Artificial Sequence
  MET Reverse Primer
gcatgggcacacacacata

SEQ ID NO: 2880 - DNA, 20 bp, Artificial Sequence
  MET Reverse Primer
atgttttgcaggaagaatgc

SEQ ID NO: 2881 - DNA, 20 bp, Artificial Sequence
  MET Reverse Primer
aagccctctgctagaccctc

SEQ ID NO: 2882 - DNA, 19 bp, Artificial Sequence
  MET Reverse Primer
gccggctcttctaatgagg

SEQ ID NO: 2883 - DNA, 20 bp, Artificial Sequence
  MET Reverse Primer
ccctcgttatcaaacccctt

SEQ ID NO: 2884 - DNA, 21 bp, Artificial Sequence
  MET Reverse Primer
agcttcttctcagcagctttg

SEQ ID NO: 2885 - DNA, 20 bp, Artificial Sequence
  MET Reverse Primer
agagagggcccaaaatcagt

SEQ ID NO: 2886 - DNA, 20 bp, Artificial Sequence
  MET Reverse Primer
tatggtcagccttgtccctc

SEQ ID NO: 2887 - DNA, 20 bp, Artificial Sequence
  MET Reverse Primer
cacctaggccatgtcacctt

SEQ ID NO: 2888 - DNA, 20 bp, Artificial Sequence
  MET Reverse Primer
aaacacgtgattcagctgcc

SEQ ID NO: 2889 - DNA, 20 bp, Artificial Sequence
  MET Reverse Primer
gaactagcacgggtcttgga

SEQ ID NO: 2890 - DNA, 20 bp, Artificial Sequence
  MET Reverse Primer
gaaattgtgatggctttcca

SEQ ID NO: 2891 - DNA, 24 bp, Artificial Sequence
  MET Reverse Primer
gcacttatacagacaaacaggaaa

SEQ ID NO: 2892 - DNA, 20 bp, Artificial Sequence
  MET Reverse Primer
aggatcctggaggggagata

SEQ ID NO: 2893 - DNA, 21 bp, Artificial Sequence
  MET Reverse Primer
tccacacacacacacaaaaca

SEQ ID NO: 2894 - DNA, 27 bp, Artificial Sequence
  MET Reverse Primer
cccagagtgacttagtctaattacaaa

SEQ ID NO: 2895 - DNA, 20 bp, Artificial Sequence
  MET Reverse Primer
tgggaatttcctgagtggaa

SEQ ID NO: 2896 - DNA, 24 bp, Artificial Sequence
  MET Reverse Primer
gcaaaatcatccttgtattcattg

SEQ ID NO: 2897 - DNA, 20 bp, Artificial Sequence
  MET Reverse Primer
ggtaattccacttctgggca

SEQ ID NO: 2898 - DNA, 22 bp, Artificial Sequence
  MET Reverse Primer
tcatgggtaactgttctttgga

SEQ ID NO: 2899 - DNA, 20 bp, Artificial Sequence
  MET Reverse Primer
agttccttcctgcttcatgc

SEQ ID NO: 2900 - DNA, 26 bp, Artificial Sequence
  MET Reverse Primer
tcaaattggtaatcttcattcttgtc

SEQ ID NO: 2901 - DNA, 21 bp, Artificial Sequence
  MET Reverse Primer
tcacctgaccaatcaagacct

SEQ ID NO: 2902 - DNA, 20 bp, Artificial Sequence
  MET Reverse Primer
ctttgtttgtggccatgtgt

SEQ ID NO: 2903 - DNA, 21 bp, Artificial Sequence
  MET Reverse Primer
cactttaatgccaatgaggga

SEQ ID NO: 2904 - DNA, 20 bp, Artificial Sequence
  MET Reverse Primer
ggcaaggaacatggaatgaa

SEQ ID NO: 2905 - DNA, 20 bp, Artificial Sequence
  MET Reverse Primer
cacaataaactgcaggctcc

SEQ ID NO: 2906 - DNA, 20 bp, Artificial Sequence
  MET Reverse Primer
tgcccacaatagaaaaagga

SEQ ID NO: 2907 - DNA, 22 bp, Artificial Sequence
  MET Reverse Primer
tgaaaccttttcctatgctctc

SEQ ID NO: 2908 - DNA, 20 bp, Artificial Sequence
  MET Reverse Primer
gccaggttctgtgcaaaata

SEQ ID NO: 2909 - DNA, 20 bp, Artificial Sequence
  MET Reverse Primer
ccttgttgtgtgaggcagtc

SEQ ID NO: 2910 - DNA, 20 bp, Artificial Sequence
  MET Reverse Primer
cttggcaacatccatagcaa

SEQ ID NO: 2911 - DNA, 20 bp, Artificial Sequence
  MET Reverse Primer
tcattgcccattgagatcat

SEQ ID NO: 2912 - DNA, 20 bp, Artificial Sequence
  MET Reverse Primer
tgacgcggatcctctttaat

SEQ ID NO: 2913 - DNA, 21 bp, Artificial Sequence
  MET Reverse Primer
ttctttgtttgcaacaggctt

SEQ ID NO: 2914 - DNA, 21 bp, Artificial Sequence
  MET Reverse Primer
gatggagatgacccatgaaag

SEQ ID NO: 2915 - DNA, 20 bp, Artificial Sequence
  MET Reverse Primer
tggaatctttcaaatggcaa

SEQ ID NO: 2916 - DNA, 20 bp, Artificial Sequence
  MET Reverse Primer
ccgaggatgatgccaaatta

SEQ ID NO: 2917 - DNA, 20 bp, Artificial Sequence
  MET Reverse Primer
tgcctttgctttcctctcat

SEQ ID NO: 2918 - DNA, 20 bp, Artificial Sequence
  MET Reverse Primer
tgatagaggcatttggggag

SEQ ID NO: 2919 - DNA, 24 bp, Artificial Sequence
  MET Reverse Primer
gctattccctctaaagaactgcat

SEQ ID NO: 2920 - DNA, 20 bp, Artificial Sequence
  MET Reverse Primer
tcctgagctctcagcatttg

SEQ ID NO: 2921 - DNA, 20 bp, Artificial Sequence
  MET Reverse Primer
ctgggccaaataacctctga

SEQ ID NO: 2922 - DNA, 20 bp, Artificial Sequence
  MET Reverse Primer
ccagggagatcagcagtagg

SEQ ID NO: 2923 - DNA, 20 bp, Artificial Sequence
  MET Reverse Primer
ctctttcctctccaaccctg

SEQ ID NO: 2924 - DNA, 20 bp, Artificial Sequence
  MET Reverse Primer
ctgcaaagatactccccctg

SEQ ID NO: 2925 - DNA, 20 bp, Artificial Sequence
  MET Reverse Primer
tataacaatggggcccaaaa

SEQ ID NO: 2926 - DNA, 20 bp, Artificial Sequence
  MET Reverse Primer
tgttggctaggtctgaaggg

SEQ ID NO: 2927 - DNA, 21 bp, Artificial Sequence
  MET Reverse Primer
ttgattggtcaggcagttatt

SEQ ID NO: 2928 - DNA, 20 bp, Artificial Sequence
  MET Reverse Primer
tagccttgcgaaagaagtgc

SEQ ID NO: 2929 - DNA, 20 bp, Artificial Sequence
  MET Reverse Primer
taacactgcccaatgcagag

SEQ ID NO: 2930 - DNA, 20 bp, Artificial Sequence
  MET Reverse Primer
gccaaggcacacgattctat

SEQ ID NO: 2931 - DNA, 20 bp, Artificial Sequence
  MET Reverse Primer
gctcgctgttcaatttcagc

SEQ ID NO: 2932 - DNA, 20 bp, Artificial Sequence
  MET Reverse Primer
gtggtgggaggcagtagaag

SEQ ID NO: 2933 - DNA, 20 bp, Artificial Sequence
  MET Reverse Primer
ggtggagggcagagaagact

SEQ ID NO: 2934 - DNA, 23 bp, Artificial Sequence
  MET Reverse Primer
tccagtgttcaaataattagggg

SEQ ID NO: 2935 - DNA, 20 bp, Artificial Sequence
  MET Reverse Primer
ccagcaatcaatcctgtgaa

SEQ ID NO: 2936 - DNA, 20 bp, Artificial Sequence
  MET Reverse Primer
taaagacggctatcatgggc

SEQ ID NO: 2937 - DNA, 20 bp, Artificial Sequence
  MET Reverse Primer
aatgtcacaacccactgagg

SEQ ID NO: 2938 - DNA, 22 bp, Artificial Sequence
  MET Reverse Primer
ggttttccttggctaagtctca

SEQ ID NO: 2939 - DNA, 20 bp, Artificial Sequence
  MET Reverse Primer
ggaatcagggcaaagacaat

SEQ ID NO: 2940 - DNA, 21 bp, Artificial Sequence
  MET Reverse Primer
tgatgacagagctttggtgag

SEQ ID NO: 2941 - DNA, 20 bp, Artificial Sequence
  MET Reverse Primer
accctgatgtcacaccacat

SEQ ID NO: 2942 - DNA, 20 bp, Artificial Sequence
  MET Reverse Primer
gttgggtgagtgaggaagga

SEQ ID NO: 2943 - DNA, 20 bp, Artificial Sequence
  MET Reverse Primer
ggagaaggttatgtgggggt

SEQ ID NO: 2944 - DNA, 20 bp, Artificial Sequence
  MET Reverse Primer
cggttagtggaccatccttg

SEQ ID NO: 2945 - DNA, 20 bp, Artificial Sequence
  MET Reverse Primer
gcctcgtctcacaaaaatcc

SEQ ID NO: 2946 - DNA, 27 bp, Artificial Sequence
  MET Reverse Primer
gtttgataaaaatgataataaattggg

SEQ ID NO: 2947 - DNA, 20 bp, Artificial Sequence
  MET Reverse Primer
gagcactgaggtcaatgtgg

SEQ ID NO: 2948 - DNA, 20 bp, Artificial Sequence
  MET Reverse Primer
tacacacaggacgaggacga

SEQ ID NO: 2949 - DNA, 20 bp, Artificial Sequence
  MET Reverse Primer
catttcccggtttttgattg

SEQ ID NO: 2950 - DNA, 20 bp, Artificial Sequence
  MET Reverse Primer
acagtgaagccactcttggg

SEQ ID NO: 2951 - DNA, 21 bp, Artificial Sequence
  MET Reverse Primer
tgagtgctcctattctcctgc

SEQ ID NO: 2952 - DNA, 20 bp, Artificial Sequence
  MET Reverse Primer
gttgcccagatgaagcaaat

SEQ ID NO: 2953 - DNA, 20 bp, Artificial Sequence
  MET Reverse Primer
catcggcctcatcaaataaa

SEQ ID NO: 2954 - DNA, 27 bp, Artificial Sequence
  MET Reverse Primer
tgagcttcattttattctttcttcttt

SEQ ID NO: 2955 - DNA, 20 bp, Artificial Sequence
  MET Reverse Primer
ttttccacaaggggaaagtg

SEQ ID NO: 2956 - DNA, 20 bp, Artificial Sequence
  MET Reverse Primer
ggaatgcctcactctccaaa

SEQ ID NO: 2957 - DNA, 21 bp, Artificial Sequence
  MET Reverse Primer
cggagccaggaacactatgta

SEQ ID NO: 2958 - DNA, 20 bp, Artificial Sequence
  MET Reverse Primer
tccctcatggtcagacttcc

SEQ ID NO: 2959 - DNA, 20 bp, Artificial Sequence
  MET Reverse Primer
cctgagaaatccagtggtgg

SEQ ID NO: 2960 - DNA, 20 bp, Artificial Sequence
  MET Reverse Primer
tattttgaagggatggctgg

SEQ ID NO: 2961 - DNA, 20 bp, Artificial Sequence
  MET Reverse Primer
caaggaacgcatctggagtt

SEQ ID NO: 2962 - DNA, 20 bp, Artificial Sequence
  MET Reverse Primer
ctggcctggtgacttttagg

SEQ ID NO: 2963 - DNA, 20 bp, Artificial Sequence
  MET Reverse Primer
tctgcaaaagttcactgcca

SEQ ID NO: 2964 - DNA, 20 bp, Artificial Sequence
  MET Reverse Primer
atctgggtttgtggttgctc

SEQ ID NO: 2965 - DNA, 20 bp, Artificial Sequence
  MET Reverse Primer
ctccagggttagtaaggccc

SEQ ID NO: 2966 - DNA, 20 bp, Artificial Sequence
  MET Reverse Primer
tggacaaactttttgcttgc

SEQ ID NO: 2967 - DNA, 20 bp, Artificial Sequence
  MET Reverse Primer
cagccctctccttttcactg

SEQ ID NO: 2968 - DNA, 20 bp, Artificial Sequence
  MET Reverse Primer
atcaatttccgctatctggg

SEQ ID NO: 2969 - DNA, 21 bp, Artificial Sequence
  MET Reverse Primer
tcaacaggctgaggaaagaga

SEQ ID NO: 2970 - DNA, 20 bp, Artificial Sequence
  MET Reverse Primer
catgtctctggcaagaccaa

SEQ ID NO: 2971 - DNA, 21 bp, Artificial Sequence
  MET Reverse Primer
aaactggaattggtggtgttg

SEQ ID NO: 2972 - DNA, 20 bp, Artificial Sequence
  MET Reverse Primer
ggatggcctttgcagataag

SEQ ID NO: 2973 - DNA, 21 bp, Artificial Sequence
  MET Reverse Primer
ctctgtgttctgttcttgcca

SEQ ID NO: 2974 - DNA, 20 bp, Artificial Sequence
  MET Reverse Primer
cagcttccaagacccttctg

SEQ ID NO: 2975 - DNA, 21 bp, Artificial Sequence
  MET Reverse Primer
tctctcaaaagctaccaaccc

SEQ ID NO: 2976 - DNA, 20 bp, Artificial Sequence
  MET Reverse Primer
tctcatgcatgctgaagtcc

SEQ ID NO: 2977 - DNA, 20 bp, Artificial Sequence
  MET Reverse Primer
gttgtaagggttggctctgg

SEQ ID NO: 2978 - DNA, 20 bp, Artificial Sequence
  MET Reverse Primer
gcgctgtcctggaagtaaaa

SEQ ID NO: 2979 - DNA, 20 bp, Artificial Sequence
  MET Reverse Primer
gtgtcccagaaaccaaagga

SEQ ID NO: 2980 - DNA, 20 bp, Artificial Sequence
  MET Reverse Primer
gagaaattgagggtttggca

SEQ ID NO: 2981 - DNA, 20 bp, Artificial Sequence
  MET Reverse Primer
gcgctatcatccgtgcttac

SEQ ID NO: 2982 - DNA, 20 bp, Artificial Sequence
  MET Reverse Primer
taggtgagggacactcctgc

SEQ ID NO: 2983 - DNA, 20 bp, Artificial Sequence
  MET Reverse Primer
gcagataactgccacacagg

SEQ ID NO: 2984 - DNA, 22 bp, Artificial Sequence
  MET Reverse Primer
ttgctgtctaattcagctttgc

SEQ ID NO: 2985 - DNA, 20 bp, Artificial Sequence
  MET Reverse Primer
gaagcttggagcagaaggaa

SEQ ID NO: 2986 - DNA, 20 bp, Artificial Sequence
  MET Reverse Primer
acagggacacggagaggtta

SEQ ID NO: 2987 - DNA, 24 bp, Artificial Sequence
  MET Reverse Primer
ccttttcttttccaatagcttcac

SEQ ID NO: 2988 - DNA, 20 bp, Artificial Sequence
  MET Reverse Primer
atacggtttctgttttgggc

SEQ ID NO: 2989 - DNA, 20 bp, Artificial Sequence
  MET Reverse Primer
ctttgaaggcaggcatttct

SEQ ID NO: 2990 - DNA, 20 bp, Artificial Sequence
  MET Reverse Primer
cgtgtgtccacctcatcatc

SEQ ID NO: 2991 - DNA, 20 bp, Artificial Sequence
  MET Reverse Primer
acaggagtgttgtcacggct

SEQ ID NO: 2992 - DNA, 22 bp, Artificial Sequence
  MET Reverse Primer
gggaatgtttacctaatgggtg

SEQ ID NO: 2993 - DNA, 21 bp, Artificial Sequence
  MET Reverse Primer
tgattggaaccaatgaacctt

SEQ ID NO: 2994 - DNA, 20 bp, Artificial Sequence
  MET Reverse Primer
agttctgctcagggtggcta

SEQ ID NO: 2995 - DNA, 23 bp, Artificial Sequence
  MET Reverse Primer
cagtcattgaaaatcatgctgtc

SEQ ID NO: 2996 - DNA, 21 bp, Artificial Sequence
  MET Reverse Primer
gaaacggcaatatttggattg

SEQ ID NO: 2997 - DNA, 20 bp, Artificial Sequence
  MET Reverse Primer
ttcagctgcaggtataggca

SEQ ID NO: 2998 - DNA, 20 bp, Artificial Sequence
  MET Reverse Primer
taggtatctgtgcgccaatg

SEQ ID NO: 2999 - DNA, 20 bp, Artificial Sequence
  PML Forward Primer
tctcttcacgcactccaaga

SEQ ID NO: 3000 - DNA, 20 bp, Artificial Sequence
  PML Forward Primer
gggaagagagggtctaacgg

SEQ ID NO: 3001 - DNA, 20 bp, Artificial Sequence
  PML Forward Primer
gatccgaggtgagaaactgg

SEQ ID NO: 3002 - DNA, 20 bp, Artificial Sequence
  PML Forward Primer
aataaatgggggtattgggg

SEQ ID NO: 3003 - DNA, 18 bp, Artificial Sequence
  PML Forward Primer
ccttgtctgcacacgctg

SEQ ID NO: 3004 - DNA, 20 bp, Artificial Sequence
  PML Forward Primer
acaccagtggttcctcaagc

SEQ ID NO: 3005 - DNA, 20 bp, Artificial Sequence
  PML Forward Primer
gggccttgcaactctaaatg

SEQ ID NO: 3006 - DNA, 20 bp, Artificial Sequence
  PML Forward Primer
aaccattaacaccaggcagc

SEQ ID NO: 3007 - DNA, 20 bp, Artificial Sequence
  PML Forward Primer
atgaaagcatttttcgctgg

SEQ ID NO: 3008 - DNA, 20 bp, Artificial Sequence
  PML Forward Primer
tggcctgtttaggtcctttg

SEQ ID NO: 3009 - DNA, 20 bp, Artificial Sequence
  PML Forward Primer
catcttggaactggtgcctt

SEQ ID NO: 3010 - DNA, 25 bp, Artificial Sequence
  PML Forward Primer
catgcacactctagaacctatctca

SEQ ID NO: 3011 - DNA, 21 bp, Artificial Sequence
  PML Forward Primer
ttacaacgcacttgttagcca

SEQ ID NO: 3012 - DNA, 20 bp, Artificial Sequence
  PML Forward Primer
actcgccagctcatcttttc

SEQ ID NO: 3013 - DNA, 20 bp, Artificial Sequence
  PML Forward Primer
ggtctgtgctatctgctccc

SEQ ID NO: 3014 - DNA, 20 bp, Artificial Sequence
  PML Forward Primer
gaaggttcagccagcaagag

SEQ ID NO: 3015 - DNA, 20 bp, Artificial Sequence
  PML Forward Primer
ttgaccctgggctgatttag

SEQ ID NO: 3016 - DNA, 20 bp, Artificial Sequence
  PML Forward Primer
catgtcgtatctggcacagg

SEQ ID NO: 3017 - DNA, 20 bp, Artificial Sequence
  PML Forward Primer
gcaggcactagaagggtgag

SEQ ID NO: 3018 - DNA, 20 bp, Artificial Sequence
  PML Forward Primer
aatctggacaagggaaaggg

SEQ ID NO: 3019 - DNA, 20 bp, Artificial Sequence
  PML Forward Primer
aatttgctggatggagttgg

SEQ ID NO: 3020 - DNA, 20 bp, Artificial Sequence
  PML Forward Primer
tgccttcgaagcttgaattt

SEQ ID NO: 3021 - DNA, 20 bp, Artificial Sequence
  PML Forward Primer
aaaagctggattgatggctg

SEQ ID NO: 3022 - DNA, 20 bp, Artificial Sequence
  PML Forward Primer
gaatctctcccagcattcca

SEQ ID NO: 3023 - DNA, 20 bp, Artificial Sequence
  PML Forward Primer
aaaatgtccaatagccaccg

SEQ ID NO: 3024 - DNA, 20 bp, Artificial Sequence
  PML Forward Primer
cctaactcccacaccctcct

SEQ ID NO: 3025 - DNA, 20 bp, Artificial Sequence
  PML Forward Primer
ggttggcttccatccttcta

SEQ ID NO: 3026 - DNA, 21 bp, Artificial Sequence
  PML Forward Primer
ttgaataatatctcggctggg

SEQ ID NO: 3027 - DNA, 20 bp, Artificial Sequence
  PML Forward Primer
ctggaacctagcatgctcct

SEQ ID NO: 3028 - DNA, 21 bp, Artificial Sequence
  PML Forward Primer
ttggttatgttctgccaaagc

SEQ ID NO: 3029 - DNA, 20 bp, Artificial Sequence
  PML Forward Primer
cttgcaacatttaccggcat

SEQ ID NO: 3030 - DNA, 20 bp, Artificial Sequence
  PML Forward Primer
atactggccatcacctcagc

SEQ ID NO: 3031 - DNA, 20 bp, Artificial Sequence
  PML Forward Primer
tgcccactatggatacacca

SEQ ID NO: 3032 - DNA, 20 bp, Artificial Sequence
  PML Forward Primer
acccatctcctctcctggtt

SEQ ID NO: 3033 - DNA, 20 bp, Artificial Sequence
  PML Forward Primer
cagctctccttcactggtcc

SEQ ID NO: 3034 - DNA, 20 bp, Artificial Sequence
  PML Forward Primer
agtctgggttcttgtcacgg

SEQ ID NO: 3035 - DNA, 20 bp, Artificial Sequence
  PML Forward Primer
tgattcaggctagccacctc

SEQ ID NO: 3036 - DNA, 20 bp, Artificial Sequence
  PML Forward Primer
ctctccccaagtgtccaaga

SEQ ID NO: 3037 - DNA, 20 bp, Artificial Sequence
  PML Forward Primer
cacacatttctgcaccttga

SEQ ID NO: 3038 - DNA, 20 bp, Artificial Sequence
  PML Forward Primer
gttaagtggcatggctgaca

SEQ ID NO: 3039 - DNA, 21 bp, Artificial Sequence
  PML Forward Primer
tgccatgattcaaagtctggt

SEQ ID NO: 3040 - DNA, 20 bp, Artificial Sequence
  PML Forward Primer
ggagcaggatagtgcctttg

SEQ ID NO: 3041 - DNA, 20 bp, Artificial Sequence
  PML Forward Primer
ggtgcagaggatgaagtgct

SEQ ID NO: 3042 - DNA, 20 bp, Artificial Sequence
  PML Forward Primer
gtcttaggttccagggcaca

SEQ ID NO: 3043 - DNA, 20 bp, Artificial Sequence
  PML Forward Primer
acggtagaagggggctaaga

SEQ ID NO: 3044 - DNA, 20 bp, Artificial Sequence
  PML Forward Primer
tccaaatccgggagatgtag

SEQ ID NO: 3045 - DNA, 19 bp, Artificial Sequence
  PML Forward Primer
tggacatgggtcatgaagg

SEQ ID NO: 3046 - DNA, 20 bp, Artificial Sequence
  PML Forward Primer
tcagtgagccggtagtgatg

SEQ ID NO: 3047 - DNA, 20 bp, Artificial Sequence
  PML Forward Primer
tgcctgtgaccttctttgtg

SEQ ID NO: 3048 - DNA, 20 bp, Artificial Sequence
  PML Forward Primer
tgccaaagttgctcttgatg

SEQ ID NO: 3049 - DNA, 20 bp, Artificial Sequence
  PML Forward Primer
gttctgctggtgtgattcca

SEQ ID NO: 3050 - DNA, 20 bp, Artificial Sequence
  PML Forward Primer
gaaatgcagtggtgtccctt

SEQ ID NO: 3051 - DNA, 20 bp, Artificial Sequence
  PML Forward Primer
ggcatgacccataggagaga

SEQ ID NO: 3052 - DNA, 20 bp, Artificial Sequence
  PML Forward Primer
agcctgcactgtcttgtgtg

SEQ ID NO: 3053 - DNA, 20 bp, Artificial Sequence
  PML Forward Primer
aagggaaagtgctccatcag

SEQ ID NO: 3054 - DNA, 21 bp, Artificial Sequence
  PML Forward Primer
tctctactgagccctctggtg

SEQ ID NO: 3055 - DNA, 20 bp, Artificial Sequence
  PML Forward Primer
gccccactaaattgctttca

SEQ ID NO: 3056 - DNA, 20 bp, Artificial Sequence
  PML Forward Primer
ggaaggaggtcaatccatca

SEQ ID NO: 3057 - DNA, 20 bp, Artificial Sequence
  PML Forward Primer
agcacttagcactgtgcctg

SEQ ID NO: 3058 - DNA, 20 bp, Artificial Sequence
  PML Forward Primer
ttaaggctgagagggcagag

SEQ ID NO: 3059 - DNA, 20 bp, Artificial Sequence
  PML Forward Primer
ggctgctgcctagtcatttc

SEQ ID NO: 3060 - DNA, 20 bp, Artificial Sequence
  PML Forward Primer
aaagtgtttgctcaacgcct

SEQ ID NO: 3061 - DNA, 19 bp, Artificial Sequence
  PML Forward Primer
aaaagggtggccacaagtc

SEQ ID NO: 3062 - DNA, 20 bp, Artificial Sequence
  PML Forward Primer
ctccaaggcagtctcaccac

SEQ ID NO: 3063 - DNA, 20 bp, Artificial Sequence
  PML Forward Primer
ggggtgagagtggacacagt

SEQ ID NO: 3064 - DNA, 20 bp, Artificial Sequence
  PML Forward Primer
cccagaggaatctggaacaa

SEQ ID NO: 3065 - DNA, 20 bp, Artificial Sequence
  PML Forward Primer
gtacagggggcaaattctga

SEQ ID NO: 3066 - DNA, 20 bp, Artificial Sequence
  PML Forward Primer
gcagctcggaagactcagat

SEQ ID NO: 3067 - DNA, 20 bp, Artificial Sequence
  PML Forward Primer
tttattacagccagtggggg

SEQ ID NO: 3068 - DNA, 19 bp, Artificial Sequence
  PML Forward Primer
gccagtccagtctctgctg

SEQ ID NO: 3069 - DNA, 20 bp, Artificial Sequence
  PML Forward Primer
cccagtggctcaacaacttt

SEQ ID NO: 3070 - DNA, 20 bp, Artificial Sequence
  PML Forward Primer
caggcctctgagagtgctac

SEQ ID NO: 3071 - DNA, 20 bp, Artificial Sequence
  PML Forward Primer
gctgagattcaagccaccat

SEQ ID NO: 3072 - DNA, 20 bp, Artificial Sequence
  PML Forward Primer
gcatcagaggtgggaggtag

SEQ ID NO: 3073 - DNA, 20 bp, Artificial Sequence
  PML Forward Primer
cgccactccttaacctctca

SEQ ID NO: 3074 - DNA, 20 bp, Artificial Sequence
  PML Forward Primer
ctgtgactgctaagggctcc

SEQ ID NO: 3075 - DNA, 20 bp, Artificial Sequence
  PML Forward Primer
ttgtttacacttcagccccc

SEQ ID NO: 3076 - DNA, 20 bp, Artificial Sequence
  PML Forward Primer
cttctcctcccgtctcactg

SEQ ID NO: 3077 - DNA, 20 bp, Artificial Sequence
  PML Forward Primer
ggagggggtaaaagcacatt

SEQ ID NO: 3078 - DNA, 20 bp, Artificial Sequence
  PML Forward Primer
agagtacacccagcaccacc

SEQ ID NO: 3079 - DNA, 20 bp, Artificial Sequence
  PML Forward Primer
tacctggggtgaggactttg

SEQ ID NO: 3080 - DNA, 18 bp, Artificial Sequence
  PML Forward Primer
ctgtggggaatggctgat

SEQ ID NO: 3081 - DNA, 20 bp, Artificial Sequence
  PML Forward Primer
atcccagctgtagctgatgc

SEQ ID NO: 3082 - DNA, 20 bp, Artificial Sequence
  PML Forward Primer
aggtcctacgccctgagatt

SEQ ID NO: 3083 - DNA, 20 bp, Artificial Sequence
  PML Forward Primer
cctcctggacttttggagtg

SEQ ID NO: 3084 - DNA, 20 bp, Artificial Sequence
  PML Forward Primer
ggctcagcctgaacacagtt

SEQ ID NO: 3085 - DNA, 20 bp, Artificial Sequence
  PML Forward Primer
ctgtcccccttccttttctc

SEQ ID NO: 3086 - DNA, 20 bp, Artificial Sequence
  PML Forward Primer
gttccagtgagaccagctcc

SEQ ID NO: 3087 - DNA, 20 bp, Artificial Sequence
  PML Forward Primer
gaggggtggcctaaagagac

SEQ ID NO: 3088 - DNA, 20 bp, Artificial Sequence
  PML Forward Primer
gagttggaaaggcgagacag

SEQ ID NO: 3089 - DNA, 20 bp, Artificial Sequence
  PML Forward Primer
tgcaaatccagtgaaatcca

SEQ ID NO: 3090 - DNA, 20 bp, Artificial Sequence
  PML Forward Primer
aaagaggaaaaacccaaggc

SEQ ID NO: 3091 - DNA, 20 bp, Artificial Sequence
  PML Forward Primer
ctctctcactgccaaggacc

SEQ ID NO: 3092 - DNA, 20 bp, Artificial Sequence
  PML Forward Primer
catagcagatggctccttcc

SEQ ID NO: 3093 - DNA, 20 bp, Artificial Sequence
  PML Forward Primer
cagttcacacccattcatgc

SEQ ID NO: 3094 - DNA, 20 bp, Artificial Sequence
  PML Forward Primer
ctacccccacccctttctaa

SEQ ID NO: 3095 - DNA, 20 bp, Artificial Sequence
  PML Forward Primer
tctcagacagagagcctggg

SEQ ID NO: 3096 - DNA, 20 bp, Artificial Sequence
  PML Forward Primer
tgtggcatggactcaacatt

SEQ ID NO: 3097 - DNA, 20 bp, Artificial Sequence
  PML Forward Primer
tgactgctatcccaccacaa

SEQ ID NO: 3098 - DNA, 20 bp, Artificial Sequence
  PML Forward Primer
gcagcacttcctcagctttc

SEQ ID NO: 3099 - DNA, 19 bp, Artificial Sequence
  PML Forward Primer
cccagcatgtctacccctt

SEQ ID NO: 3100 - DNA, 20 bp, Artificial Sequence
  PML Forward Primer
aaggagtctccaccccactt

SEQ ID NO: 3101 - DNA, 22 bp, Artificial Sequence
  PML Forward Primer
cctacagagaaggttccaaagc

SEQ ID NO: 3102 - DNA, 20 bp, Artificial Sequence
  PML Forward Primer
tgaggtgatgctggctacag

SEQ ID NO: 3103 - DNA, 20 bp, Artificial Sequence
  PML Forward Primer
tgtgccatcctgcattttta

SEQ ID NO: 3104 - DNA, 20 bp, Artificial Sequence
  PML Forward Primer
gtagggtcttgttcccacga

SEQ ID NO: 3105 - DNA, 20 bp, Artificial Sequence
  PML Forward Primer
ctgagagccctttgttgctc

SEQ ID NO: 3106 - DNA, 22 bp, Artificial Sequence
  PML Forward Primer
tctgtgttccttgagtgacagg

SEQ ID NO: 3107 - DNA, 20 bp, Artificial Sequence
  PML Forward Primer
caactaccatcccagatgcc

SEQ ID NO: 3108 - DNA, 20 bp, Artificial Sequence
  PML Forward Primer
aagggatctttgtgggaacc

SEQ ID NO: 3109 - DNA, 20 bp, Artificial Sequence
  PML Reverse Primer
aagcttaaccccatcatccc

SEQ ID NO: 3110 - DNA, 20 bp, Artificial Sequence
  PML Reverse Primer
actgacccttctcaccttgc

SEQ ID NO: 3111 - DNA, 20 bp, Artificial Sequence
  PML Reverse Primer
atgaaggggagtaaaagggc

SEQ ID NO: 3112 - DNA, 20 bp, Artificial Sequence
  PML Reverse Primer
cgcagaaactggaactcctc

SEQ ID NO: 3113 - DNA, 20 bp, Artificial Sequence
  PML Reverse Primer
ctcaaagcaccagaagtcgg

SEQ ID NO: 3114 - DNA, 20 bp, Artificial Sequence
  PML Reverse Primer
ttggatctttgctcctctcg

SEQ ID NO: 3115 - DNA, 20 bp, Artificial Sequence
  PML Reverse Primer
tagaattcccgtccccctac

SEQ ID NO: 3116 - DNA, 20 bp, Artificial Sequence
  PML Reverse Primer
gaagtggtgggaattaggca

SEQ ID NO: 3117 - DNA, 20 bp, Artificial Sequence
  PML Reverse Primer
tggaaagccactcaaccttt

SEQ ID NO: 3118 - DNA, 23 bp, Artificial Sequence
  PML Reverse Primer
ccagagataaagccaatttctcc

SEQ ID NO: 3119 - DNA, 23 bp, Artificial Sequence
  PML Reverse Primer
tgaaaagactgctaaaccacaaa

SEQ ID NO: 3120 - DNA, 24 bp, Artificial Sequence
  PML Reverse Primer
cctgttcagaaaggatgtttacaa

SEQ ID NO: 3121 - DNA, 21 bp, Artificial Sequence
  PML Reverse Primer
tgtgacagcaaaagaaggaca

SEQ ID NO: 3122 - DNA, 20 bp, Artificial Sequence
  PML Reverse Primer
tgccaactgtgtttttcagg

SEQ ID NO: 3123 - DNA, 20 bp, Artificial Sequence
  PML Reverse Primer
agaaatccacctctgacccc

SEQ ID NO: 3124 - DNA, 22 bp, Artificial Sequence
  PML Reverse Primer
ttgtgaccagaggaaagttgtg

SEQ ID NO: 3125 - DNA, 20 bp, Artificial Sequence
  PML Reverse Primer
ccccaccccctagtaaagaa

SEQ ID NO: 3126 - DNA, 20 bp, Artificial Sequence
  PML Reverse Primer
gtgcagtccctcctgtctgt

SEQ ID NO: 3127 - DNA, 20 bp, Artificial Sequence
  PML Reverse Primer
cccatcaatgggttttcaac

SEQ ID NO: 3128 - DNA, 20 bp, Artificial Sequence
  PML Reverse Primer
caggacttagctccacctgc

SEQ ID NO: 3129 - DNA, 20 bp, Artificial Sequence
  PML Reverse Primer
ccaggaagcaatcccaataa

SEQ ID NO: 3130 - DNA, 20 bp, Artificial Sequence
  PML Reverse Primer
ccttcaaggtgtagcccaaa

SEQ ID NO: 3131 - DNA, 20 bp, Artificial Sequence
  PML Reverse Primer
gggtgtaacctctggagctg

SEQ ID NO: 3132 - DNA, 22 bp, Artificial Sequence
  PML Reverse Primer
ggcacattcttctttcttcttg

SEQ ID NO: 3133 - DNA, 20 bp, Artificial Sequence
  PML Reverse Primer
ctgaacagcccattccctaa

SEQ ID NO: 3134 - DNA, 20 bp, Artificial Sequence
  PML Reverse Primer
agtcattagctgtgggctgc

SEQ ID NO: 3135 - DNA, 21 bp, Artificial Sequence
  PML Reverse Primer
cccaaagacattctcaacacc

SEQ ID NO: 3136 - DNA, 24 bp, Artificial Sequence
  PML Reverse Primer
acaaaatgttaaacaccaagacag

SEQ ID NO: 3137 - DNA, 20 bp, Artificial Sequence
  PML Reverse Primer
aagttcccccaccctaaatg

SEQ ID NO: 3138 - DNA, 22 bp, Artificial Sequence
  PML Reverse Primer
catgaaatgtccagagatggaa

SEQ ID NO: 3139 - DNA, 23 bp, Artificial Sequence
  PML Reverse Primer
tccaaatagtgtcagcagtgaga

SEQ ID NO: 3140 - DNA, 20 bp, Artificial Sequence
  PML Reverse Primer
tgctggctcctaaacctgtc

SEQ ID NO: 3141 - DNA, 20 bp, Artificial Sequence
  PML Reverse Primer
agtgttggagaggggaaagc

SEQ ID NO: 3142 - DNA, 20 bp, Artificial Sequence
  PML Reverse Primer
tacctgtcccatttccatgc

SEQ ID NO: 3143 - DNA, 20 bp, Artificial Sequence
  PML Reverse Primer
gggggtattacacatggcac

SEQ ID NO: 3144 - DNA, 20 bp, Artificial Sequence
  PML Reverse Primer
ccagccctctggtaagactg

SEQ ID NO: 3145 - DNA, 20 bp, Artificial Sequence
  PML Reverse Primer
atccccttccttggagacag

SEQ ID NO: 3146 - DNA, 20 bp, Artificial Sequence
  PML Reverse Primer
tgggtggaatgagggtagag

SEQ ID NO: 3147 - DNA, 21 bp, Artificial Sequence
  PML Reverse Primer
aagccattgaggaagctcttt

SEQ ID NO: 3148 - DNA, 20 bp, Artificial Sequence
  PML Reverse Primer
ttcaacatccgggaaacaat

SEQ ID NO: 3149 - DNA, 19 bp, Artificial Sequence
  PML Reverse Primer
gatctctgcgctgatgtcg

SEQ ID NO: 3150 - DNA, 20 bp, Artificial Sequence
  PML Reverse Primer
gactggccatctcctcgtag

SEQ ID NO: 3151 - DNA, 19 bp, Artificial Sequence
  PML Reverse Primer
gtgcgtgcttacctttccc

SEQ ID NO: 3152 - DNA, 20 bp, Artificial Sequence
  PML Reverse Primer
gaacctcctgaagtgcttgg

SEQ ID NO: 3153 - DNA, 20 bp, Artificial Sequence
  PML Reverse Primer
tacgtgaagtggctctggct

SEQ ID NO: 3154 - DNA, 20 bp, Artificial Sequence
  PML Reverse Primer
ctctttgtcactggcaccct

SEQ ID NO: 3155 - DNA, 20 bp, Artificial Sequence
  PML Reverse Primer
cttccttatctgcagcctgg

SEQ ID NO: 3156 - DNA, 20 bp, Artificial Sequence
  PML Reverse Primer
atcccaaagcactggacaac

SEQ ID NO: 3157 - DNA, 20 bp, Artificial Sequence
  PML Reverse Primer
cacttgctgtccctcactca

SEQ ID NO: 3158 - DNA, 20 bp, Artificial Sequence
  PML Reverse Primer
ggtgtaggaggggagaggac

SEQ ID NO: 3159 - DNA, 20 bp, Artificial Sequence
  PML Reverse Primer
gagcagtccagagttgggag

SEQ ID NO: 3160 - DNA, 20 bp, Artificial Sequence
  PML Reverse Primer
ccagaagacctgctgtccat

SEQ ID NO: 3161 - DNA, 20 bp, Artificial Sequence
  PML Reverse Primer
gcccctaatttgctgtgtgt

SEQ ID NO: 3162 - DNA, 20 bp, Artificial Sequence
  PML Reverse Primer
cacagtgttccccacttcct

SEQ ID NO: 3163 - DNA, 20 bp, Artificial Sequence
  PML Reverse Primer
atatctgagctgctgccacc

SEQ ID NO: 3164 - DNA, 23 bp, Artificial Sequence
  PML Reverse Primer
aaaaggagtttaaaaggtcctgc

SEQ ID NO: 3165 - DNA, 22 bp, Artificial Sequence
  PML Reverse Primer
ccttcctttctttttctccaaa

SEQ ID NO: 3166 - DNA, 20 bp, Artificial Sequence
  PML Reverse Primer
gacaagctctgtccctcctg

SEQ ID NO: 3167 - DNA, 21 bp, Artificial Sequence
  PML Reverse Primer
cacaagttggatgaattgctt

SEQ ID NO: 3168 - DNA, 20 bp, Artificial Sequence
  PML Reverse Primer
gtgtcctaacagggctggaa

SEQ ID NO: 3169 - DNA, 20 bp, Artificial Sequence
  PML Reverse Primer
gctggggagaaccttacctc

SEQ ID NO: 3170 - DNA, 20 bp, Artificial Sequence
  PML Reverse Primer
tctcaaccacgcagattacg

SEQ ID NO: 3171 - DNA, 18 bp, Artificial Sequence
  PML Reverse Primer
agccaaccttgcctcctt

SEQ ID NO: 3172 - DNA, 20 bp, Artificial Sequence
  PML Reverse Primer
gatggggccaaaatacagaa

SEQ ID NO: 3173 - DNA, 20 bp, Artificial Sequence
  PML Reverse Primer
taaggtcatggggagtccag

SEQ ID NO: 3174 - DNA, 20 bp, Artificial Sequence
  PML Reverse Primer
ctccatgagctgggatgtct

SEQ ID NO: 3175 - DNA, 20 bp, Artificial Sequence
  PML Reverse Primer
ggtgtgcacctatgggaatc

SEQ ID NO: 3176 - DNA, 20 bp, Artificial Sequence
  PML Reverse Primer
tgcagctgtcatttggagac

SEQ ID NO: 3177 - DNA, 20 bp, Artificial Sequence
  PML Reverse Primer
ttcccctggacaggtgatag

SEQ ID NO: 3178 - DNA, 20 bp, Artificial Sequence
  PML Reverse Primer
ggatggctctctgtgctctg

SEQ ID NO: 3179 - DNA, 20 bp, Artificial Sequence
  PML Reverse Primer
acagggtggtgggaatgtaa

SEQ ID NO: 3180 - DNA, 20 bp, Artificial Sequence
  PML Reverse Primer
ctcagccagagaagacccag

SEQ ID NO: 3181 - DNA, 20 bp, Artificial Sequence
  PML Reverse Primer
tattgagcagccacatctgc

SEQ ID NO: 3182 - DNA, 20 bp, Artificial Sequence
  PML Reverse Primer
gtcactcaggaggaaggcag

SEQ ID NO: 3183 - DNA, 20 bp, Artificial Sequence
  PML Reverse Primer
gaaagatgggatgaaatggg

SEQ ID NO: 3184 - DNA, 20 bp, Artificial Sequence
  PML Reverse Primer
tgcgatggggatctgtaaat

SEQ ID NO: 3185 - DNA, 20 bp, Artificial Sequence
  PML Reverse Primer
acagagcctgcagaggagag

SEQ ID NO: 3186 - DNA, 20 bp, Artificial Sequence
  PML Reverse Primer
tacccagggtcagtggtagc

SEQ ID NO: 3187 - DNA, 20 bp, Artificial Sequence
  PML Reverse Primer
gggacctaatttgttggggt

SEQ ID NO: 3188 - DNA, 20 bp, Artificial Sequence
  PML Reverse Primer
gggttcctaaatgccctgat

SEQ ID NO: 3189 - DNA, 19 bp, Artificial Sequence
  PML Reverse Primer
actgccacttctgccacag

SEQ ID NO: 3190 - DNA, 20 bp, Artificial Sequence
  PML Reverse Primer
acacaaaaccccagctcttg

SEQ ID NO: 3191 - DNA, 20 bp, Artificial Sequence
  PML Reverse Primer
ccagtgtacagccagcttga

SEQ ID NO: 3192 - DNA, 20 bp, Artificial Sequence
  PML Reverse Primer
tcctctgcggtattacaccc

SEQ ID NO: 3193 - DNA, 23 bp, Artificial Sequence
  PML Reverse Primer
ttcaggatatacatgcaacttgg

SEQ ID NO: 3194 - DNA, 20 bp, Artificial Sequence
  PML Reverse Primer
gggaaagctttgctatgcag

SEQ ID NO: 3195 - DNA, 20 bp, Artificial Sequence
  PML Reverse Primer
agggccatcagacatagtgg

SEQ ID NO: 3196 - DNA, 20 bp, Artificial Sequence
  PML Reverse Primer
ccagggaaatgtcctttgtc

SEQ ID NO: 3197 - DNA, 20 bp, Artificial Sequence
  PML Reverse Primer
tgacatggcacacaggactt

SEQ ID NO: 3198 - DNA, 20 bp, Artificial Sequence
  PML Reverse Primer
ctccaggctcatcagctttc

SEQ ID NO: 3199 - DNA, 20 bp, Artificial Sequence
  PML Reverse Primer
tggtgtcacctggtgctaaa

SEQ ID NO: 3200 - DNA, 20 bp, Artificial Sequence
  PML Reverse Primer
ggtggagcctctgatggtaa

SEQ ID NO: 3201 - DNA, 20 bp, Artificial Sequence
  PML Reverse Primer
aaacaccaaaacttgggacg

SEQ ID NO: 3202 - DNA, 20 bp, Artificial Sequence
  PML Reverse Primer
ggaggaagggtgacacacac

SEQ ID NO: 3203 - DNA, 20 bp, Artificial Sequence
  PML Reverse Primer
ctggactcactgctgctgtc

SEQ ID NO: 3204 - DNA, 20 bp, Artificial Sequence
  PML Reverse Primer
gcacactcaggcactggata

SEQ ID NO: 3205 - DNA, 20 bp, Artificial Sequence
  PML Reverse Primer
ctggaggaagtagaggggct

SEQ ID NO: 3206 - DNA, 20 bp, Artificial Sequence
  PML Reverse Primer
cccaggctgcttgaacttag

SEQ ID NO: 3207 - DNA, 20 bp, Artificial Sequence
  PML Reverse Primer
cagctggctaatcttctggg

SEQ ID NO: 3208 - DNA, 20 bp, Artificial Sequence
  PML Reverse Primer
ggccaggttcttgagtttga

SEQ ID NO: 3209 - DNA, 20 bp, Artificial Sequence
  PML Reverse Primer
ggtggtctgcaggcttagat

SEQ ID NO: 3210 - DNA, 20 bp, Artificial Sequence
  PML Reverse Primer
tcccagagaaagggaactga

SEQ ID NO: 3211 - DNA, 20 bp, Artificial Sequence
  PML Reverse Primer
gtcagggcagagctgtaagg

SEQ ID NO: 3212 - DNA, 20 bp, Artificial Sequence
  PML Reverse Primer
aagcaagctttggaaggtca

SEQ ID NO: 3213 - DNA, 20 bp, Artificial Sequence
  PML Reverse Primer
gagtagggatgggaaggagg

SEQ ID NO: 3214 - DNA, 20 bp, Artificial Sequence
  PML Reverse Primer
cagaacacccctcaatcaca

SEQ ID NO: 3215 - DNA, 20 bp, Artificial Sequence
  PML Reverse Primer
ggcaaagttcctgcagactc

SEQ ID NO: 3216 - DNA, 20 bp, Artificial Sequence
  PML Reverse Primer
ggcactgatcaattcccatt

SEQ ID NO: 3217 - DNA, 20 bp, Artificial Sequence
  PML Reverse Primer
ccaaagagggccacagacta

SEQ ID NO: 3218 - DNA, 20 bp, Artificial Sequence
  PML Reverse Primer
acccccacaattgtttgttc

SEQ ID NO: 3219 - DNA, 19 bp, Artificial Sequence
  PTEN Forward Primer
acaacagcctaccctgcct

SEQ ID NO: 3220 - DNA, 20 bp, Artificial Sequence
  PTEN Forward Primer
aacgtgggagtagacggatg

SEQ ID NO: 3221 - DNA, 20 bp, Artificial Sequence
  PTEN Forward Primer
tcttggcttaggccctagat

SEQ ID NO: 3222 - DNA, 20 bp, Artificial Sequence
  PTEN Forward Primer
ccctatggggtgatgtagga

SEQ ID NO: 3223 - DNA, 20 bp, Artificial Sequence
  PTEN Forward Primer
ggtcctctgacaccttttgg

SEQ ID NO: 3224 - DNA, 20 bp, Artificial Sequence
  PTEN Forward Primer
cgggcttcaaaagttagtgg

SEQ ID NO: 3225 - DNA, 20 bp, Artificial Sequence
  PTEN Forward Primer
tttggtaatgcgaattgtgg

SEQ ID NO: 3226 - DNA, 20 bp, Artificial Sequence
  PTEN Forward Primer
ctaaggctaaactggacccg

SEQ ID NO: 3227 - DNA, 21 bp, Artificial Sequence
  PTEN Forward Primer
gcattttctttgatttcagcg

SEQ ID NO: 3228 - DNA, 20 bp, Artificial Sequence
  PTEN Forward Primer
ttggtttgcttgttttcacg

SEQ ID NO: 3229 - DNA, 23 bp, Artificial Sequence
  PTEN Forward Primer
ttggtagatttgcctcttttcaa

SEQ ID NO: 3230 - DNA, 27 bp, Artificial Sequence
  PTEN Forward Primer
tcatttttcatagtgcttattcaagtg

SEQ ID NO: 3231 - DNA, 20 bp, Artificial Sequence
  PTEN Forward Primer
taacatgggaaaggcaactg

SEQ ID NO: 3232 - DNA, 23 bp, Artificial Sequence
  PTEN Forward Primer
tgggaaattcacttcacaaagtt

SEQ ID NO: 3233 - DNA, 21 bp, Artificial Sequence
  PTEN Forward Primer
agaattcatcttgtggcctga

SEQ ID NO: 3234 - DNA, 20 bp, Artificial Sequence
  PTEN Forward Primer
gggtgcattactgccacata

SEQ ID NO: 3235 - DNA, 24 bp, Artificial Sequence
  PTEN Forward Primer
gcactggaataaataagtatcggc

SEQ ID NO: 3236 - DNA, 27 bp, Artificial Sequence
  PTEN Forward Primer
caaagttagcaaaccttttatcttaat

SEQ ID NO: 3237 - DNA, 20 bp, Artificial Sequence
  PTEN Forward Primer
tggggatgataatggaacct

SEQ ID NO: 3238 - DNA, 22 bp, Artificial Sequence
  PTEN Forward Primer
tgctaactcaaactgttgacca

SEQ ID NO: 3239 - DNA, 20 bp, Artificial Sequence
  PTEN Forward Primer
ttcagccttttgagggagtc

SEQ ID NO: 3240 - DNA, 20 bp, Artificial Sequence
  PTEN Forward Primer
ttcccagatgtaccacagca

SEQ ID NO: 3241 - DNA, 24 bp, Artificial Sequence
  PTEN Forward Primer
tttgatttttgtagattttcaggc

SEQ ID NO: 3242 - DNA, 21 bp, Artificial Sequence
  PTEN Forward Primer
tgaaattttggggatgtcatt

SEQ ID NO: 3243 - DNA, 20 bp, Artificial Sequence
  PTEN Forward Primer
aaatcagtacctttgccccc

SEQ ID NO: 3244 - DNA, 23 bp, Artificial Sequence
  PTEN Forward Primer
tgtagttgttgaactgttgggag

SEQ ID NO: 3245 - DNA, 20 bp, Artificial Sequence
  PTEN Forward Primer
gccctaaatttgctatgcca

SEQ ID NO: 3246 - DNA, 20 bp, Artificial Sequence
  PTEN Forward Primer
tgctttgcctctcacttttg

SEQ ID NO: 3247 - DNA, 22 bp, Artificial Sequence
  PTEN Forward Primer
cgttgccttaattaaatggtga

SEQ ID NO: 3248 - DNA, 24 bp, Artificial Sequence
  PTEN Forward Primer
tccttttcctgttgtaagaacatt

SEQ ID NO: 3249 - DNA, 20 bp, Artificial Sequence
  PTEN Forward Primer
atgaaaacagggatggcaaa

SEQ ID NO: 3250 - DNA, 21 bp, Artificial Sequence
  PTEN Forward Primer
ttgacaccactgtttttggaa

SEQ ID NO: 3251 - DNA, 21 bp, Artificial Sequence
  PTEN Forward Primer
caggactcaatcagggaactg

SEQ ID NO: 3252 - DNA, 23 bp, Artificial Sequence
  PTEN Forward Primer
ttcttgagaaatttgttatgcca

SEQ ID NO: 3253 - DNA, 20 bp, Artificial Sequence
  PTEN Forward Primer
taccttttgggcctttctga

SEQ ID NO: 3254 - DNA, 27 bp, Artificial Sequence
  PTEN Forward Primer
tgttttaaaagcttatttacttgttga

SEQ ID NO: 3255 - DNA, 20 bp, Artificial Sequence
  PTEN Forward Primer
tcaaaccaagcaatgcagac

SEQ ID NO: 3256 - DNA, 22 bp, Artificial Sequence
  PTEN Forward Primer
acagacaatatgttggctttca

SEQ ID NO: 3257 - DNA, 21 bp, Artificial Sequence
  PTEN Forward Primer
ggttaatcacctctggcaaaa

SEQ ID NO: 3258 - DNA, 24 bp, Artificial Sequence
  PTEN Forward Primer
tcttcctgaggttctaatttgctt

SEQ ID NO: 3259 - DNA, 21 bp, Artificial Sequence
  PTEN Forward Primer
cactttttatttgtcgccagg

SEQ ID NO: 3260 - DNA, 20 bp, Artificial Sequence
  PTEN Forward Primer
ttgccaaatgaacgagtttg

SEQ ID NO: 3261 - DNA, 20 bp, Artificial Sequence
  PTEN Forward Primer
ttcctttctggtttggcact

SEQ ID NO: 3262 - DNA, 20 bp, Artificial Sequence
  PTEN Forward Primer
tcccatttggtccttgaaac

SEQ ID NO: 3263 - DNA, 21 bp, Artificial Sequence
  PTEN Forward Primer
gctctttctgctttctgctca

SEQ ID NO: 3264 - DNA, 20 bp, Artificial Sequence
  PTEN Forward Primer
tttttgctcacaagaaccct

SEQ ID NO: 3265 - DNA, 22 bp, Artificial Sequence
  PTEN Forward Primer
tggctttatttttagcaaacca

SEQ ID NO: 3266 - DNA, 21 bp, Artificial Sequence
  PTEN Forward Primer
tgggacggtatttgttctttg

SEQ ID NO: 3267 - DNA, 25 bp, Artificial Sequence
  PTEN Forward Primer
caaataagcaaacacatactgaaaa

SEQ ID NO: 3268 - DNA, 20 bp, Artificial Sequence
  PTEN Forward Primer
acagtggggtcttatgggat

SEQ ID NO: 3269 - DNA, 23 bp, Artificial Sequence
  PTEN Forward Primer
ctcatcttcctctggttacctgg

SEQ ID NO: 3270 - DNA, 20 bp, Artificial Sequence
  PTEN Forward Primer
gcctcaagatttggtgcttg

SEQ ID NO: 3271 - DNA, 23 bp, Artificial Sequence
  PTEN Forward Primer
tggagcttcgtatataatctggg

SEQ ID NO: 3272 - DNA, 20 bp, Artificial Sequence
  PTEN Forward Primer
gctgctctgcaaagtcttcc

SEQ ID NO: 3273 - DNA, 21 bp, Artificial Sequence
  PTEN Forward Primer
cccacagaattaatccttccc

SEQ ID NO: 3274 - DNA, 20 bp, Artificial Sequence
  PTEN Forward Primer
ggggctttgtacttctgtgc

SEQ ID NO: 3275 - DNA, 22 bp, Artificial Sequence
  PTEN Forward Primer
atttcactttaggcctctgctg

SEQ ID NO: 3276 - DNA, 21 bp, Artificial Sequence
  PTEN Forward Primer
aaaaatgttcttggggcatag

SEQ ID NO: 3277 - DNA, 22 bp, Artificial Sequence
  PTEN Forward Primer
aaaaatatacatgccaccacct

SEQ ID NO: 3278 - DNA, 20 bp, Artificial Sequence
  PTEN Forward Primer
aaaacagtatccaggccagc

SEQ ID NO: 3279 - DNA, 20 bp, Artificial Sequence
  PTEN Forward Primer
gatggccactgaaattggac

SEQ ID NO: 3280 - DNA, 20 bp, Artificial Sequence
  PTEN Forward Primer
agccttcctccttctcttgg

SEQ ID NO: 3281 - DNA, 20 bp, Artificial Sequence
  PTEN Forward Primer
gtgcagtgtccaaatagccc

SEQ ID NO: 3282 - DNA, 24 bp, Artificial Sequence
  PTEN Forward Primer
tccctatacgaaagatatacccag

SEQ ID NO: 3283 - DNA, 20 bp, Artificial Sequence
  PTEN Forward Primer
cctagaaaaagggcattgga

SEQ ID NO: 3284 - DNA, 27 bp, Artificial Sequence
  PTEN Forward Primer
agaaaagatttctaagccacagaaaaa

SEQ ID NO: 3285 - DNA, 21 bp, Artificial Sequence
  PTEN Forward Primer
tttcatagttggggattaggc

SEQ ID NO: 3286 - DNA, 23 bp, Artificial Sequence
  PTEN Forward Primer
tctttcctggagactttcaattt

SEQ ID NO: 3287 - DNA, 20 bp, Artificial Sequence
  PTEN Forward Primer
tagggatgccagaaggactg

SEQ ID NO: 3288 - DNA, 21 bp, Artificial Sequence
  PTEN Forward Primer
gggcaggttttctgattatgg

SEQ ID NO: 3289 - DNA, 20 bp, Artificial Sequence
  PTEN Forward Primer
ccagtggttcttttagccga

SEQ ID NO: 3290 - DNA, 20 bp, Artificial Sequence
  PTEN Forward Primer
ctccaagagaatggctgtgc

SEQ ID NO: 3291 - DNA, 23 bp, Artificial Sequence
  PTEN Forward Primer
gcagtctttaacaaaattggtgc

SEQ ID NO: 3292 - DNA, 21 bp, Artificial Sequence
  PTEN Forward Primer
ggccacctcctacttctttca

SEQ ID NO: 3293 - DNA, 21 bp, Artificial Sequence
  PTEN Forward Primer
tcagattccgaagttgtttcc

SEQ ID NO: 3294 - DNA, 26 bp, Artificial Sequence
  PTEN Forward Primer
ttttgagattgtaactttgattctgt

SEQ ID NO: 3295 - DNA, 22 bp, Artificial Sequence
  PTEN Forward Primer
gccaagcacaataaaagaaacc

SEQ ID NO: 3296 - DNA, 20 bp, Artificial Sequence
  PTEN Forward Primer
gggggaaaaactcaaggact

SEQ ID NO: 3297 - DNA, 20 bp, Artificial Sequence
  PTEN Forward Primer
cccaaaattgtgatgttgct

SEQ ID NO: 3298 - DNA, 20 bp, Artificial Sequence
  PTEN Forward Primer
tacctgggtcgtagtcaggc

SEQ ID NO: 3299 - DNA, 20 bp, Artificial Sequence
  PTEN Forward Primer
tgcagcatgtgaagcttttt

SEQ ID NO: 3300 - DNA, 20 bp, Artificial Sequence
  PTEN Forward Primer
gcaaattttcccatttccct

SEQ ID NO: 3301 - DNA, 20 bp, Artificial Sequence
  PTEN Forward Primer
agggagctcacaaaagagca

SEQ ID NO: 3302 - DNA, 20 bp, Artificial Sequence
  PTEN Forward Primer
atagctgctgccactatgcc

SEQ ID NO: 3303 - DNA, 21 bp, Artificial Sequence
  PTEN Forward Primer
tgaaatggtattttggttgcc

SEQ ID NO: 3304 - DNA, 20 bp, Artificial Sequence
  PTEN Forward Primer
gcagtggagttgctaggtcc

SEQ ID NO: 3305 - DNA, 21 bp, Artificial Sequence
  PTEN Forward Primer
aatgttctgcttctcttgcca

SEQ ID NO: 3306 - DNA, 20 bp, Artificial Sequence
  PTEN Forward Primer
ctgcacctggcctaattttt

SEQ ID NO: 3307 - DNA, 25 bp, Artificial Sequence
  PTEN Forward Primer
tgtgtatttcctcctttgtcttttt

SEQ ID NO: 3308 - DNA, 20 bp, Artificial Sequence
  PTEN Forward Primer
gtttcctggcatttccactc

SEQ ID NO: 3309 - DNA, 20 bp, Artificial Sequence
  PTEN Forward Primer
ggcctcaaattgctgtcttt

SEQ ID NO: 3310 - DNA, 20 bp, Artificial Sequence
  PTEN Forward Primer
tcttttgtcctagggcatgg

SEQ ID NO: 3311 - DNA, 20 bp, Artificial Sequence
  PTEN Forward Primer
gcaaggggcactatgtttct

SEQ ID NO: 3312 - DNA, 27 bp, Artificial Sequence
  PTEN Forward Primer
aatgccattcatagttaagtgatagag

SEQ ID NO: 3313 - DNA, 20 bp, Artificial Sequence
  PTEN Forward Primer
tgttcttcctggcttgctgt

SEQ ID NO: 3314 - DNA, 20 bp, Artificial Sequence
  PTEN Forward Primer
cctgtttcttctctggcagc

SEQ ID NO: 3315 - DNA, 20 bp, Artificial Sequence
  PTEN Forward Primer
ttaattcctcggcttcatgg

SEQ ID NO: 3316 - DNA, 20 bp, Artificial Sequence
  PTEN Forward Primer
ttgtgagggtcgaatggagt

SEQ ID NO: 3317 - DNA, 26 bp, Artificial Sequence
  PTEN Forward Primer
ttcagtctcattatgttaggttgaag

SEQ ID NO: 3318 - DNA, 25 bp, Artificial Sequence
  PTEN Forward Primer
tgcttgcaaatatcttctaaaacaa

SEQ ID NO: 3319 - DNA, 20 bp, Artificial Sequence
  PTEN Forward Primer
agcccataaccgtgtggtaa

SEQ ID NO: 3320 - DNA, 20 bp, Artificial Sequence
  PTEN Forward Primer
ttttaaggactgcccacctg

SEQ ID NO: 3321 - DNA, 24 bp, Artificial Sequence
  PTEN Forward Primer
tgatttttctcagagtcatgaagg

SEQ ID NO: 3322 - DNA, 20 bp, Artificial Sequence
  PTEN Forward Primer
aggaaggcaagtttgagctg

SEQ ID NO: 3323 - DNA, 20 bp, Artificial Sequence
  PTEN Forward Primer
aaagagccttgttgcggata

SEQ ID NO: 3324 - DNA, 25 bp, Artificial Sequence
  PTEN Forward Primer
tgtgtagtgacttcctgctttaaga

SEQ ID NO: 3325 - DNA, 23 bp, Artificial Sequence
  PTEN Forward Primer
tgagttctaatgtcactttccga

SEQ ID NO: 3326 - DNA, 21 bp, Artificial Sequence
  PTEN Forward Primer
catgggtgaagaagagttcct

SEQ ID NO: 3327 - DNA, 23 bp, Artificial Sequence
  PTEN Forward Primer
ttcttgcctttgaggaatttaag

SEQ ID NO: 3328 - DNA, 20 bp, Artificial Sequence
  PTEN Forward Primer
taaaccccatttgccatttg

SEQ ID NO: 3329 - DNA, 24 bp, Artificial Sequence
  PTEN Forward Primer
tttccttgctttttactgtcactg

SEQ ID NO: 3330 - DNA, 20 bp, Artificial Sequence
  PTEN Forward Primer
tcacgtgattgtgaggatga

SEQ ID NO: 3331 - DNA, 20 bp, Artificial Sequence
  PTEN Forward Primer
tgtgttgtcctgagaccagc

SEQ ID NO: 3332 - DNA, 20 bp, Artificial Sequence
  PTEN Forward Primer
cttggggccaagtatgtttc

SEQ ID NO: 3333 - DNA, 23 bp, Artificial Sequence
  PTEN Forward Primer
gcctgttaatcattagaaagcca

SEQ ID NO: 3334 - DNA, 23 bp, Artificial Sequence
  PTEN Forward Primer
gcatttggccaagtagattaaca

SEQ ID NO: 3335 - DNA, 22 bp, Artificial Sequence
  PTEN Forward Primer
tggcatcacaagtttttaagca

SEQ ID NO: 3336 - DNA, 23 bp, Artificial Sequence
  PTEN Forward Primer
tgagtcatccagattatcgagtg

SEQ ID NO: 3337 - DNA, 20 bp, Artificial Sequence
  PTEN Forward Primer
ctgatggatgagaggaggga

SEQ ID NO: 3338 - DNA, 20 bp, Artificial Sequence
  PTEN Forward Primer
ggtggatttaggctgttgct

SEQ ID NO: 3339 - DNA, 20 bp, Artificial Sequence
  PTEN Forward Primer
gccagggtttttaaggatct

SEQ ID NO: 3340 - DNA, 22 bp, Artificial Sequence
  PTEN Forward Primer
cttggcttccctaatgattaca

SEQ ID NO: 3341 - DNA, 21 bp, Artificial Sequence
  PTEN Forward Primer
tgctaccagtccgtatagcgt

SEQ ID NO: 3342 - DNA, 20 bp, Artificial Sequence
  PTEN Forward Primer
tcagttgctgcctcaatttc

SEQ ID NO: 3343 - DNA, 27 bp, Artificial Sequence
  PTEN Forward Primer
ggactatattgaaaaatcagtgacaaa

SEQ ID NO: 3344 - DNA, 20 bp, Artificial Sequence
  PTEN Forward Primer
ttccttgttcctttaccccc

SEQ ID NO: 3345 - DNA, 20 bp, Artificial Sequence
  PTEN Forward Primer
ggaggcgcagaacactagat

SEQ ID NO: 3346 - DNA, 26 bp, Artificial Sequence
  PTEN Forward Primer
ccaaaattaagctttagttctgttca

SEQ ID NO: 3347 - DNA, 21 bp, Artificial Sequence
  PTEN Forward Primer
tgtttcatcattttctttgcc

SEQ ID NO: 3348 - DNA, 22 bp, Artificial Sequence
  PTEN Forward Primer
gctcttgattgaaagtcttggc

SEQ ID NO: 3349 - DNA, 20 bp, Artificial Sequence
  PTEN Forward Primer
accagtgccccaatatcaga

SEQ ID NO: 3350 - DNA, 22 bp, Artificial Sequence
  PTEN Forward Primer
tgaagaaaggtggtacttccaa

SEQ ID NO: 3351 - DNA, 21 bp, Artificial Sequence
  PTEN Forward Primer
tgtgctctcacatgtggtctc

SEQ ID NO: 3352 - DNA, 20 bp, Artificial Sequence
  PTEN Forward Primer
tcttcagaggtgaggggaga

SEQ ID NO: 3353 - DNA, 22 bp, Artificial Sequence
  PTEN Forward Primer
ttgattgctttttgtgtcttgg

SEQ ID NO: 3354 - DNA, 20 bp, Artificial Sequence
  PTEN Forward Primer
atcaaacaggcacaggaagg

SEQ ID NO: 3355 - DNA, 20 bp, Artificial Sequence
  PTEN Forward Primer
tttgaaaggctcctcagctt

SEQ ID NO: 3356 - DNA, 21 bp, Artificial Sequence
  PTEN Forward Primer
caactgtggaattcttcctga

SEQ ID NO: 3357 - DNA, 20 bp, Artificial Sequence
  PTEN Forward Primer
ttgaagggagatgaggcagt

SEQ ID NO: 3358 - DNA, 20 bp, Artificial Sequence
  PTEN Forward Primer
ggtaaccgcttaagggaagg

SEQ ID NO: 3359 - DNA, 22 bp, Artificial Sequence
  PTEN Forward Primer
ccacactatctgcatctgcact

SEQ ID NO: 3360 - DNA, 20 bp, Artificial Sequence
  PTEN Forward Primer
tttggtttctctggggaatg

SEQ ID NO: 3361 - DNA, 25 bp, Artificial Sequence
  PTEN Forward Primer
tctgcagtccaaattatttttcttt

SEQ ID NO: 3362 - DNA, 20 bp, Artificial Sequence
  PTEN Forward Primer
tctctccctcccttaccctc

SEQ ID NO: 3363 - DNA, 20 bp, Artificial Sequence
  PTEN Forward Primer
aggaggggaaagaatgttgg

SEQ ID NO: 3364 - DNA, 20 bp, Artificial Sequence
  PTEN Forward Primer
tgaggtccagatcctggttt

SEQ ID NO: 3365 - DNA, 20 bp, Artificial Sequence
  PTEN Forward Primer
agcagtgccagtggaaagtt

SEQ ID NO: 3366 - DNA, 22 bp, Artificial Sequence
  PTEN Forward Primer
ggcaaatttcaatttcaaaagc

SEQ ID NO: 3367 - DNA, 24 bp, Artificial Sequence
  PTEN Forward Primer
cagtgatgaaatcatccagataca

SEQ ID NO: 3368 - DNA, 20 bp, Artificial Sequence
  PTEN Forward Primer
actgattgcatgaaaatgcc

SEQ ID NO: 3369 - DNA, 21 bp, Artificial Sequence
  PTEN Forward Primer
gagccctcaagaaatacctgg

SEQ ID NO: 3370 - DNA, 20 bp, Artificial Sequence
  PTEN Forward Primer
ggaaacagaggttggagctg

SEQ ID NO: 3371 - DNA, 21 bp, Artificial Sequence
  PTEN Forward Primer
ggccacagaaaactgaaactg

SEQ ID NO: 3372 - DNA, 20 bp, Artificial Sequence
  PTEN Forward Primer
gtgctggagttccctcactt

SEQ ID NO: 3373 - DNA, 20 bp, Artificial Sequence
  PTEN Forward Primer
tgtgggctcaataagtgacg

SEQ ID NO: 3374 - DNA, 20 bp, Artificial Sequence
  PTEN Forward Primer
tgggtgacagagtgagacca

SEQ ID NO: 3375 - DNA, 20 bp, Artificial Sequence
  PTEN Forward Primer
atgacctcagggttcccagt

SEQ ID NO: 3376 - DNA, 22 bp, Artificial Sequence
  PTEN Forward Primer
agtgtggactttccactcattg

SEQ ID NO: 3377 - DNA, 27 bp, Artificial Sequence
  PTEN Forward Primer
aaatgtacttttccatgtttttctttg

SEQ ID NO: 3378 - DNA, 21 bp, Artificial Sequence
  PTEN Forward Primer
tgcacacaaacttatgccaaa

SEQ ID NO: 3379 - DNA, 25 bp, Artificial Sequence
  PTEN Forward Primer
aaaattttggtctttatactgtggc

SEQ ID NO: 3380 - DNA, 24 bp, Artificial Sequence
  PTEN Forward Primer
cattagggagaagaaggttgtgtc

SEQ ID NO: 3381 - DNA, 21 bp, Artificial Sequence
  PTEN Forward Primer
ttcgtcttcgttagtgaatgc

SEQ ID NO: 3382 - DNA, 20 bp, Artificial Sequence
  PTEN Forward Primer
gtttttgttgggccctaatg

SEQ ID NO: 3383 - DNA, 20 bp, Artificial Sequence
  PTEN Forward Primer
ctatggggttcatgggtcag

SEQ ID NO: 3384 - DNA, 20 bp, Artificial Sequence
  PTEN Forward Primer
agtggcggaacttgcagtaa

SEQ ID NO: 3385 - DNA, 20 bp, Artificial Sequence
  PTEN Forward Primer
aaccaccaaatacagcccaa

SEQ ID NO: 3386 - DNA, 23 bp, Artificial Sequence
  PTEN Forward Primer
tggagtgttagagaaaacctgga

SEQ ID NO: 3387 - DNA, 23 bp, Artificial Sequence
  PTEN Forward Primer
tctacctcagtcatcctgatcct

SEQ ID NO: 3388 - DNA, 20 bp, Artificial Sequence
  PTEN Forward Primer
cttgagtggaagtgcagcag

SEQ ID NO: 3389 - DNA, 20 bp, Artificial Sequence
  PTEN Forward Primer
ttgccttaatgcaggtatgc

SEQ ID NO: 3390 - DNA, 20 bp, Artificial Sequence
  PTEN Forward Primer
gcatcatcaggaaagggaga

SEQ ID NO: 3391 - DNA, 26 bp, Artificial Sequence
  PTEN Forward Primer
tttgctttttaaagtcctaaaatcag

SEQ ID NO: 3392 - DNA, 20 bp, Artificial Sequence
  PTEN Forward Primer
accatgttggagtagcctgc

SEQ ID NO: 3393 - DNA, 21 bp, Artificial Sequence
  PTEN Forward Primer
tcctcagcgtatgacaaatga

SEQ ID NO: 3394 - DNA, 20 bp, Artificial Sequence
  PTEN Forward Primer
ttcctgttatgatggtggca

SEQ ID NO: 3395 - DNA, 23 bp, Artificial Sequence
  PTEN Forward Primer
aaagttttgaagttactctgcca

SEQ ID NO: 3396 - DNA, 22 bp, Artificial Sequence
  PTEN Forward Primer
tttgtagtgttgctgccttgtt

SEQ ID NO: 3397 - DNA, 20 bp, Artificial Sequence
  PTEN Forward Primer
ttagccagaaacccatttcc

SEQ ID NO: 3398 - DNA, 22 bp, Artificial Sequence
  PTEN Forward Primer
cattttattgattttccctgcc

SEQ ID NO: 3399 - DNA, 20 bp, Artificial Sequence
  PTEN Forward Primer
aggccagatttctttgttgg

SEQ ID NO: 3400 - DNA, 21 bp, Artificial Sequence
  PTEN Forward Primer
caccgtccaagaacttttgtt

SEQ ID NO: 3401 - DNA, 20 bp, Artificial Sequence
  PTEN Forward Primer
gggaactcagtcatttggga

SEQ ID NO: 3402 - DNA, 23 bp, Artificial Sequence
  PTEN Forward Primer
caccttctctccttgtttcttga

SEQ ID NO: 3403 - DNA, 26 bp, Artificial Sequence
  PTEN Forward Primer
aacttttaaaatgtctttttcccttt

SEQ ID NO: 3404 - DNA, 21 bp, Artificial Sequence
  PTEN Forward Primer
tgcaaaagcccttagacaaga

SEQ ID NO: 3405 - DNA, 20 bp, Artificial Sequence
  PTEN Forward Primer
gatgcagtggatgttggttg

SEQ ID NO: 3406 - DNA, 20 bp, Artificial Sequence
  PTEN Forward Primer
atagctgtcagccgttccac

SEQ ID NO: 3407 - DNA, 20 bp, Artificial Sequence
  PTEN Forward Primer
gcccagactgcatacgattt

SEQ ID NO: 3408 - DNA, 21 bp, Artificial Sequence
  PTEN Forward Primer
tgttgacacgttttccatacc

SEQ ID NO: 3409 - DNA, 21 bp, Artificial Sequence
  PTEN Forward Primer
ggcaccgcatattaaaacgta

SEQ ID NO: 3410 - DNA, 21 bp, Artificial Sequence
  PTEN Forward Primer
ccatccccatagaatttgaca

SEQ ID NO: 3411 - DNA, 20 bp, Artificial Sequence
  PTEN Forward Primer
gggcagccaaatgtgaatac

SEQ ID NO: 3412 - DNA, 22 bp, Artificial Sequence
  PTEN Forward Primer
tttcaattttgtggcttttgtc

SEQ ID NO: 3413 - DNA, 25 bp, Artificial Sequence
  PTEN Forward Primer
cacattttatttttcggtatcttgg

SEQ ID NO: 3414 - DNA, 20 bp, Artificial Sequence
  PTEN Forward Primer
gcaggcttccaaaggcttat

SEQ ID NO: 3415 - DNA, 20 bp, Artificial Sequence
  PTEN Forward Primer
cctgaaaaccaggaaacagg

SEQ ID NO: 3416 - DNA, 20 bp, Artificial Sequence
  PTEN Forward Primer
cttccccatcacaacaacaa

SEQ ID NO: 3417 - DNA, 21 bp, Artificial Sequence
  PTEN Forward Primer
ttctaatgccacagatgcaga

SEQ ID NO: 3418 - DNA, 20 bp, Artificial Sequence
  PTEN Forward Primer
agttcccaaacagttgctca

SEQ ID NO: 3419 - DNA, 23 bp, Artificial Sequence
  PTEN Forward Primer
tgaaaaatatttagctgagggca

SEQ ID NO: 3420 - DNA, 22 bp, Artificial Sequence
  PTEN Forward Primer
tgtttcagtttgccaagtctgt

SEQ ID NO: 3421 - DNA, 23 bp, Artificial Sequence
  PTEN Forward Primer
ttttcaagagtgctagacttcca

SEQ ID NO: 3422 - DNA, 21 bp, Artificial Sequence
  PTEN Forward Primer
tccatttggctactgatggac

SEQ ID NO: 3423 - DNA, 19 bp, Artificial Sequence
  PTEN Reverse Primer
agagcggtagctctgggtg

SEQ ID NO: 3424 - DNA, 20 bp, Artificial Sequence
  PTEN Reverse Primer
tagccctcaggaagagacca

SEQ ID NO: 3425 - DNA, 20 bp, Artificial Sequence
  PTEN Reverse Primer
actttttgccctcaatgtgc

SEQ ID NO: 3426 - DNA, 20 bp, Artificial Sequence
  PTEN Reverse Primer
cagcaattctggcatcacaa

SEQ ID NO: 3427 - DNA, 22 bp, Artificial Sequence
  PTEN Reverse Primer
cacactgttaaaattcttgggc

SEQ ID NO: 3428 - DNA, 21 bp, Artificial Sequence
  PTEN Reverse Primer
tgcttcagtcacttcagacca

SEQ ID NO: 3429 - DNA, 20 bp, Artificial Sequence
  PTEN Reverse Primer
acggaataaaacctctcccg

SEQ ID NO: 3430 - DNA, 22 bp, Artificial Sequence
  PTEN Reverse Primer
tgctgaaagaaatctgtctccc

SEQ ID NO: 3431 - DNA, 23 bp, Artificial Sequence
  PTEN Reverse Primer
caagcacttcactgactttcctt

SEQ ID NO: 3432 - DNA, 20 bp, Artificial Sequence
  PTEN Reverse Primer
ttgtcctcaattttcctcgg

SEQ ID NO: 3433 - DNA, 21 bp, Artificial Sequence
  PTEN Reverse Primer
ggtccagtcatgtttttcagg

SEQ ID NO: 3434 - DNA, 26 bp, Artificial Sequence
  PTEN Reverse Primer
gaaggtggttatacctcaccatattt

SEQ ID NO: 3435 - DNA, 20 bp, Artificial Sequence
  PTEN Reverse Primer
ttgcgctatcaccaaatgaa

SEQ ID NO: 3436 - DNA, 20 bp, Artificial Sequence
  PTEN Reverse Primer
tatggcagaggcctcacatt

SEQ ID NO: 3437 - DNA, 20 bp, Artificial Sequence
  PTEN Reverse Primer
gctcagcaaagccttaccaa

SEQ ID NO: 3438 - DNA, 20 bp, Artificial Sequence
  PTEN Reverse Primer
tcctctgcaaccaatgaaaa

SEQ ID NO: 3439 - DNA, 23 bp, Artificial Sequence
  PTEN Reverse Primer
aaaattctcaacactgccaaaaa

SEQ ID NO: 3440 - DNA, 20 bp, Artificial Sequence
  PTEN Reverse Primer
ccacactgcctccctaaaat

SEQ ID NO: 3441 - DNA, 20 bp, Artificial Sequence
  PTEN Reverse Primer
gcccaaactgaggaaattca

SEQ ID NO: 3442 - DNA, 25 bp, Artificial Sequence
  PTEN Reverse Primer
ttgaggcagagtttactttatgtga

SEQ ID NO: 3443 - DNA, 22 bp, Artificial Sequence
  PTEN Reverse Primer
acttctttcttcccacgtcttg

SEQ ID NO: 3444 - DNA, 20 bp, Artificial Sequence
  PTEN Reverse Primer
atgccaaaatgcacaattca

SEQ ID NO: 3445 - DNA, 20 bp, Artificial Sequence
  PTEN Reverse Primer
ggcaacaacagcaaaactcc

SEQ ID NO: 3446 - DNA, 26 bp, Artificial Sequence
  PTEN Reverse Primer
tctttcataaatgattctttcaaggt

SEQ ID NO: 3447 - DNA, 21 bp, Artificial Sequence
  PTEN Reverse Primer
cacaatcagccaaagaacaca

SEQ ID NO: 3448 - DNA, 22 bp, Artificial Sequence
  PTEN Reverse Primer
caaagaaccttagagtcagccc

SEQ ID NO: 3449 - DNA, 20 bp, Artificial Sequence
  PTEN Reverse Primer
atttgcctgccctaaaaaca

SEQ ID NO: 3450 - DNA, 25 bp, Artificial Sequence
  PTEN Reverse Primer
acaataagcacatagttttcattca

SEQ ID NO: 3451 - DNA, 20 bp, Artificial Sequence
  PTEN Reverse Primer
ggggaaaaatcttcaaggct

SEQ ID NO: 3452 - DNA, 20 bp, Artificial Sequence
  PTEN Reverse Primer
gattacctgggcaactgtgc

SEQ ID NO: 3453 - DNA, 22 bp, Artificial Sequence
  PTEN Reverse Primer
aagcagcacgttagcatatttt

SEQ ID NO: 3454 - DNA, 20 bp, Artificial Sequence
  PTEN Reverse Primer
ccaaacaatcgagggaaaaa

SEQ ID NO: 3455 - DNA, 23 bp, Artificial Sequence
  PTEN Reverse Primer
ttggtaagaccaaattcttgtga

SEQ ID NO: 3456 - DNA, 21 bp, Artificial Sequence
  PTEN Reverse Primer
cctccaattcagttctcacca

SEQ ID NO: 3457 - DNA, 20 bp, Artificial Sequence
  PTEN Reverse Primer
ccaacagttagatgggaggg

SEQ ID NO: 3458 - DNA, 23 bp, Artificial Sequence
  PTEN Reverse Primer
tgcttgttattgaagggatacca

SEQ ID NO: 3459 - DNA, 22 bp, Artificial Sequence
  PTEN Reverse Primer
tgattcctattcccactgaagg

SEQ ID NO: 3460 - DNA, 23 bp, Artificial Sequence
  PTEN Reverse Primer
tgtgtgctagattgcatcatttt

SEQ ID NO: 3461 - DNA, 20 bp, Artificial Sequence
  PTEN Reverse Primer
tgaactaagccaaatgccaa

SEQ ID NO: 3462 - DNA, 23 bp, Artificial Sequence
  PTEN Reverse Primer
gggaaacataatttccagtgaca

SEQ ID NO: 3463 - DNA, 22 bp, Artificial Sequence
  PTEN Reverse Primer
tcctgtaatcccactctagcaa

SEQ ID NO: 3464 - DNA, 20 bp, Artificial Sequence
  PTEN Reverse Primer
ccaaacaacctgacctcaca

SEQ ID NO: 3465 - DNA, 21 bp, Artificial Sequence
  PTEN Reverse Primer
ggggttgttattagatggtgc

SEQ ID NO: 3466 - DNA, 22 bp, Artificial Sequence
  PTEN Reverse Primer
aggtaccaaatcctgtgctaag

SEQ ID NO: 3467 - DNA, 26 bp, Artificial Sequence
  PTEN Reverse Primer
tttccaattatgtcacagttaaatcc

SEQ ID NO: 3468 - DNA, 20 bp, Artificial Sequence
  PTEN Reverse Primer
aagctgcctggctcataaaa

SEQ ID NO: 3469 - DNA, 20 bp, Artificial Sequence
  PTEN Reverse Primer
cttccgagttgacatccaaa

SEQ ID NO: 3470 - DNA, 20 bp, Artificial Sequence
  PTEN Reverse Primer
cccagctccaacagatctca

SEQ ID NO: 3471 - DNA, 21 bp, Artificial Sequence
  PTEN Reverse Primer
caacgacagtgacttgtggaa

SEQ ID NO: 3472 - DNA, 20 bp, Artificial Sequence
  PTEN Reverse Primer
tgctagaattggaaccccag

SEQ ID NO: 3473 - DNA, 27 bp, Artificial Sequence
  PTEN Reverse Primer
ttgacattttagaaaaactaaacaaca

SEQ ID NO: 3474 - DNA, 20 bp, Artificial Sequence
  PTEN Reverse Primer
accatactgcccaacgagag

SEQ ID NO: 3475 - DNA, 20 bp, Artificial Sequence
  PTEN Reverse Primer
catcggcatccatcctaagt

SEQ ID NO: 3476 - DNA, 20 bp, Artificial Sequence
  PTEN Reverse Primer
gaacattccaagcaaaggct

SEQ ID NO: 3477 - DNA, 20 bp, Artificial Sequence
  PTEN Reverse Primer
ccccctccttcattcacata

SEQ ID NO: 3478 - DNA, 25 bp, Artificial Sequence
  PTEN Reverse Primer
ccaatactctggaattcctactcaa

SEQ ID NO: 3479 - DNA, 22 bp, Artificial Sequence
  PTEN Reverse Primer
ctctcacataagaaagctgccc

SEQ ID NO: 3480 - DNA, 21 bp, Artificial Sequence
  PTEN Reverse Primer
tgccacaatgtacctgtatcg

SEQ ID NO: 3481 - DNA, 20 bp, Artificial Sequence
  PTEN Reverse Primer
tttaatgtgatccgggcatt

SEQ ID NO: 3482 - DNA, 21 bp, Artificial Sequence
  PTEN Reverse Primer
tgagacagcaaactggacaaa

SEQ ID NO: 3483 - DNA, 20 bp, Artificial Sequence
  PTEN Reverse Primer
ttttgcaaaccctgatgaaa

SEQ ID NO: 3484 - DNA, 22 bp, Artificial Sequence
  PTEN Reverse Primer
ggtcttttctctgaaatggcct

SEQ ID NO: 3485 - DNA, 20 bp, Artificial Sequence
  PTEN Reverse Primer
gaaagggaagaaaaggggaa

SEQ ID NO: 3486 - DNA, 23 bp, Artificial Sequence
  PTEN Reverse Primer
cagctttcacatgattgagttga

SEQ ID NO: 3487 - DNA, 21 bp, Artificial Sequence
  PTEN Reverse Primer
cccactcatcataccagctct

SEQ ID NO: 3488 - DNA, 20 bp, Artificial Sequence
  PTEN Reverse Primer
tggtgaccagcattttatgg

SEQ ID NO: 3489 - DNA, 20 bp, Artificial Sequence
  PTEN Reverse Primer
cttggtacacccagcgattc

SEQ ID NO: 3490 - DNA, 20 bp, Artificial Sequence
  PTEN Reverse Primer
tctaccgtggttcaaagcaa

SEQ ID NO: 3491 - DNA, 20 bp, Artificial Sequence
  PTEN Reverse Primer
tcccagattcaccatcttcc

SEQ ID NO: 3492 - DNA, 20 bp, Artificial Sequence
  PTEN Reverse Primer
tggaaggaccaaaatgcttc

SEQ ID NO: 3493 - DNA, 22 bp, Artificial Sequence
  PTEN Reverse Primer
ctcataaaagaagaggaggggc

SEQ ID NO: 3494 - DNA, 20 bp, Artificial Sequence
  PTEN Reverse Primer
gagggcaaacaaaaatccaa

SEQ ID NO: 3495 - DNA, 22 bp, Artificial Sequence
  PTEN Reverse Primer
gggaaagggaaagaacagaaaa

SEQ ID NO: 3496 - DNA, 21 bp, Artificial Sequence
  PTEN Reverse Primer
aaaccatctatgaaatgggga

SEQ ID NO: 3497 - DNA, 20 bp, Artificial Sequence
  PTEN Reverse Primer
tgtcagccaagtgttggaag

SEQ ID NO: 3498 - DNA, 23 bp, Artificial Sequence
  PTEN Reverse Primer
tggatgtttctctcctttgtttt

SEQ ID NO: 3499 - DNA, 20 bp, Artificial Sequence
  PTEN Reverse Primer
ggctgaatgcagaactttca

SEQ ID NO: 3500 - DNA, 20 bp, Artificial Sequence
  PTEN Reverse Primer
ctgctccaagcaaaactggt

SEQ ID NO: 3501 - DNA, 20 bp, Artificial Sequence
  PTEN Reverse Primer
attcctgcttctccccagat

SEQ ID NO: 3502 - DNA, 20 bp, Artificial Sequence
  PTEN Reverse Primer
gggagtgtagtagtggggca

SEQ ID NO: 3503 - DNA, 24 bp, Artificial Sequence
  PTEN Reverse Primer
gaggtaatactcccaaaacttgga

SEQ ID NO: 3504 - DNA, 22 bp, Artificial Sequence
  PTEN Reverse Primer
ggggatgaggttatgttctctc

SEQ ID NO: 3505 - DNA, 20 bp, Artificial Sequence
  PTEN Reverse Primer
gcttcccttagcttccacct

SEQ ID NO: 3506 - DNA, 26 bp, Artificial Sequence
  PTEN Reverse Primer
gaagcagatacttctttcctcatctt

SEQ ID NO: 3507 - DNA, 20 bp, Artificial Sequence
  PTEN Reverse Primer
aaaatttttgaaaggggcca

SEQ ID NO: 3508 - DNA, 22 bp, Artificial Sequence
  PTEN Reverse Primer
caaaaagtcgctaaacctcaca

SEQ ID NO: 3509 - DNA, 24 bp, Artificial Sequence
  PTEN Reverse Primer
ggagtagtgggtacatgacagttc

SEQ ID NO: 3510 - DNA, 20 bp, Artificial Sequence
  PTEN Reverse Primer
accaacacagctgcagtgaa

SEQ ID NO: 3511 - DNA, 22 bp, Artificial Sequence
  PTEN Reverse Primer
agagttcacgtcagacaaggaa

SEQ ID NO: 3512 - DNA, 25 bp, Artificial Sequence
  PTEN Reverse Primer
gagcataaaattggaacagagaaaa

SEQ ID NO: 3513 - DNA, 21 bp, Artificial Sequence
  PTEN Reverse Primer
gcaaagcagaaaaacatgacc

SEQ ID NO: 3514 - DNA, 20 bp, Artificial Sequence
  PTEN Reverse Primer
tttcatctcaggtccttggc

SEQ ID NO: 3515 - DNA, 20 bp, Artificial Sequence
  PTEN Reverse Primer
tggcaagaagaaggatgagg

SEQ ID NO: 3516 - DNA, 21 bp, Artificial Sequence
  PTEN Reverse Primer
ttagaaggcacctggaaaaga

SEQ ID NO: 3517 - DNA, 21 bp, Artificial Sequence
  PTEN Reverse Primer
aatcagcgaaatctcaaacca

SEQ ID NO: 3518 - DNA, 23 bp, Artificial Sequence
  PTEN Reverse Primer
tccagaaacagagaacactgaga

SEQ ID NO: 3519 - DNA, 20 bp, Artificial Sequence
  PTEN Reverse Primer
tccaaggtcatgtacagcca

SEQ ID NO: 3520 - DNA, 24 bp, Artificial Sequence
  PTEN Reverse Primer
aaaagcattagcatttagtgcaag

SEQ ID NO: 3521 - DNA, 27 bp, Artificial Sequence
  PTEN Reverse Primer
ttttctttttcctaatctcaaatacca

SEQ ID NO: 3522 - DNA, 21 bp, Artificial Sequence
  PTEN Reverse Primer
tgccaagtcatttaaagcaga

SEQ ID NO: 3523 - DNA, 20 bp, Artificial Sequence
  PTEN Reverse Primer
caagccacctaattcagcaa

SEQ ID NO: 3524 - DNA, 21 bp, Artificial Sequence
  PTEN Reverse Primer
cacgttttatgtgccgatttt

SEQ ID NO: 3525 - DNA, 22 bp, Artificial Sequence
  PTEN Reverse Primer
caatgttctcttcattgcaacc

SEQ ID NO: 3526 - DNA, 20 bp, Artificial Sequence
  PTEN Reverse Primer
gcctattgccaccacaattc

SEQ ID NO: 3527 - DNA, 20 bp, Artificial Sequence
  PTEN Reverse Primer
tttggtgtccttcgatttcc

SEQ ID NO: 3528 - DNA, 20 bp, Artificial Sequence
  PTEN Reverse Primer
ggggaaggggcattaaaata

SEQ ID NO: 3529 - DNA, 21 bp, Artificial Sequence
  PTEN Reverse Primer
tgggtatgcctagtgcaaata

SEQ ID NO: 3530 - DNA, 20 bp, Artificial Sequence
  PTEN Reverse Primer
ctatctccccttccccattc

SEQ ID NO: 3531 - DNA, 21 bp, Artificial Sequence
  PTEN Reverse Primer
tcagctaggtaggcaggtctc

SEQ ID NO: 3532 - DNA, 20 bp, Artificial Sequence
  PTEN Reverse Primer
ggagcaaatatgctgggact

SEQ ID NO: 3533 - DNA, 21 bp, Artificial Sequence
  PTEN Reverse Primer
tgaaagagccagaactcaagc

SEQ ID NO: 3534 - DNA, 21 bp, Artificial Sequence
  PTEN Reverse Primer
ccctactttctcaggatccca

SEQ ID NO: 3535 - DNA, 22 bp, Artificial Sequence
  PTEN Reverse Primer
tgcatccttgctagtaatttca

SEQ ID NO: 3536 - DNA, 21 bp, Artificial Sequence
  PTEN Reverse Primer
tggcaaactcaactacagcaa

SEQ ID NO: 3537 - DNA, 20 bp, Artificial Sequence
  PTEN Reverse Primer
ctccctgttgaaaagccaac

SEQ ID NO: 3538 - DNA, 22 bp, Artificial Sequence
  PTEN Reverse Primer
gaaaaatctgcatgctattgga

SEQ ID NO: 3539 - DNA, 25 bp, Artificial Sequence
  PTEN Reverse Primer
aatactaacaaacattgcctgaatc

SEQ ID NO: 3540 - DNA, 23 bp, Artificial Sequence
  PTEN Reverse Primer
gaccaactgcctcaaatagtagg

SEQ ID NO: 3541 - DNA, 20 bp, Artificial Sequence
  PTEN Reverse Primer
catggcacccactttctttt

SEQ ID NO: 3542 - DNA, 20 bp, Artificial Sequence
  PTEN Reverse Primer
tcctttggtgtgacaggaga

SEQ ID NO: 3543 - DNA, 25 bp, Artificial Sequence
  PTEN Reverse Primer
caccaaagaaattactcacaaaatg

SEQ ID NO: 3544 - DNA, 20 bp, Artificial Sequence
  PTEN Reverse Primer
cgtcaggactctcaatgcaa

SEQ ID NO: 3545 - DNA, 26 bp, Artificial Sequence
  PTEN Reverse Primer
gaaatgttgcatacaaacttaacagg

SEQ ID NO: 3546 - DNA, 20 bp, Artificial Sequence
  PTEN Reverse Primer
ccaaaggcattctatgctca

SEQ ID NO: 3547 - DNA, 20 bp, Artificial Sequence
  PTEN Reverse Primer
tatctggaggggcttaggct

SEQ ID NO: 3548 - DNA, 20 bp, Artificial Sequence
  PTEN Reverse Primer
tcattccaaggtgcaaacaa

SEQ ID NO: 3549 - DNA, 21 bp, Artificial Sequence
  PTEN Reverse Primer
agtagccactggtttttgcat

SEQ ID NO: 3550 - DNA, 26 bp, Artificial Sequence
  PTEN Reverse Primer
gattccatttactcttctttcttttg

SEQ ID NO: 3551 - DNA, 21 bp, Artificial Sequence
  PTEN Reverse Primer
ttccctgctttcagaagacaa

SEQ ID NO: 3552 - DNA, 20 bp, Artificial Sequence
  PTEN Reverse Primer
ggtcacccactgctctcttc

SEQ ID NO: 3553 - DNA, 20 bp, Artificial Sequence
  PTEN Reverse Primer
gccggctacaagttttcatc

SEQ ID NO: 3554 - DNA, 26 bp, Artificial Sequence
  PTEN Reverse Primer
tgattgtaatgctaaacaaacaaaaa

SEQ ID NO: 3555 - DNA, 20 bp, Artificial Sequence
  PTEN Reverse Primer
tgcccttgggttttactttt

SEQ ID NO: 3556 - DNA, 20 bp, Artificial Sequence
  PTEN Reverse Primer
cttgggggatattccaacct

SEQ ID NO: 3557 - DNA, 20 bp, Artificial Sequence
  PTEN Reverse Primer
atggtcaaccaacagcatct

SEQ ID NO: 3558 - DNA, 20 bp, Artificial Sequence
  PTEN Reverse Primer
cataaccttgcaggaaagcc

SEQ ID NO: 3559 - DNA, 20 bp, Artificial Sequence
  PTEN Reverse Primer
ccaacaggcaaacaagtggt

SEQ ID NO: 3560 - DNA, 25 bp, Artificial Sequence
  PTEN Reverse Primer
aaccccatacaaactgaaaagtaga

SEQ ID NO: 3561 - DNA, 20 bp, Artificial Sequence
  PTEN Reverse Primer
tgcaacactgaaaacccaaa

SEQ ID NO: 3562 - DNA, 20 bp, Artificial Sequence
  PTEN Reverse Primer
caaccctagaagttgccctg

SEQ ID NO: 3563 - DNA, 19 bp, Artificial Sequence
  PTEN Reverse Primer
caagggagagggaaacagc

SEQ ID NO: 3564 - DNA, 20 bp, Artificial Sequence
  PTEN Reverse Primer
agtaacatggtttggcccag

SEQ ID NO: 3565 - DNA, 20 bp, Artificial Sequence
  PTEN Reverse Primer
cacctagatccaggccagag

SEQ ID NO: 3566 - DNA, 20 bp, Artificial Sequence
  PTEN Reverse Primer
ataggcatgtgcctcaatcc

SEQ ID NO: 3567 - DNA, 20 bp, Artificial Sequence
  PTEN Reverse Primer
ttgtactcagctgtcctggg

SEQ ID NO: 3568 - DNA, 21 bp, Artificial Sequence
  PTEN Reverse Primer
ggaaagcaattcaacaaagga

SEQ ID NO: 3569 - DNA, 24 bp, Artificial Sequence
  PTEN Reverse Primer
tctttcagacctaaaatactgcca

SEQ ID NO: 3570 - DNA, 24 bp, Artificial Sequence
  PTEN Reverse Primer
ttcctatcattgcttttctaccaa

SEQ ID NO: 3571 - DNA, 22 bp, Artificial Sequence
  PTEN Reverse Primer
tgaattgtaatcaaggaatggg

SEQ ID NO: 3572 - DNA, 21 bp, Artificial Sequence
  PTEN Reverse Primer
tcactgaaaattgcccacttc

SEQ ID NO: 3573 - DNA, 24 bp, Artificial Sequence
  PTEN Reverse Primer
ttttccctaaattgtaccttctgg

SEQ ID NO: 3574 - DNA, 20 bp, Artificial Sequence
  PTEN Reverse Primer
tcttcctgcaattttgccat

SEQ ID NO: 3575 - DNA, 20 bp, Artificial Sequence
  PTEN Reverse Primer
ggcagcagagtggagctaag

SEQ ID NO: 3576 - DNA, 26 bp, Artificial Sequence
  PTEN Reverse Primer
tggtaaaccattttatagatgaggtg

SEQ ID NO: 3577 - DNA, 20 bp, Artificial Sequence
  PTEN Reverse Primer
ttattcccaactgccagtgc

SEQ ID NO: 3578 - DNA, 20 bp, Artificial Sequence
  PTEN Reverse Primer
tttatccaaggctggcaaac

SEQ ID NO: 3579 - DNA, 20 bp, Artificial Sequence
  PTEN Reverse Primer
taatattccttccagccccc

SEQ ID NO: 3580 - DNA, 20 bp, Artificial Sequence
  PTEN Reverse Primer
atctacctgctgccttgtca

SEQ ID NO: 3581 - DNA, 27 bp, Artificial Sequence
  PTEN Reverse Primer
ttttcaagtagcaagtgattagtagtg

SEQ ID NO: 3582 - DNA, 20 bp, Artificial Sequence
  PTEN Reverse Primer
catggaagatgagtgggagg

SEQ ID NO: 3583 - DNA, 23 bp, Artificial Sequence
  PTEN Reverse Primer
aaaccaggtatgctgaatagcaa

SEQ ID NO: 3584 - DNA, 25 bp, Artificial Sequence
  PTEN Reverse Primer
catgtgacttaagaaaaatccaacc

SEQ ID NO: 3585 - DNA, 21 bp, Artificial Sequence
  PTEN Reverse Primer
tgttgaagaaaccagggaaaa

SEQ ID NO: 3586 - DNA, 20 bp, Artificial Sequence
  PTEN Reverse Primer
cctctgccctacagctatgc

SEQ ID NO: 3587 - DNA, 20 bp, Artificial Sequence
  PTEN Reverse Primer
ggtaactgggtcgtagccat

SEQ ID NO: 3588 - DNA, 20 bp, Artificial Sequence
  PTEN Reverse Primer
taaaacccattgcttttggc

SEQ ID NO: 3589 - DNA, 20 bp, Artificial Sequence
  PTEN Reverse Primer
cttgctgccacgtcttatca

SEQ ID NO: 3590 - DNA, 24 bp, Artificial Sequence
  PTEN Reverse Primer
gggagaaataaatagaggcagaca

SEQ ID NO: 3591 - DNA, 21 bp, Artificial Sequence
  PTEN Reverse Primer
gctcagtaccttgcattcagc

SEQ ID NO: 3592 - DNA, 22 bp, Artificial Sequence
  PTEN Reverse Primer
tcttgcgattacaactttgcat

SEQ ID NO: 3593 - DNA, 21 bp, Artificial Sequence
  PTEN Reverse Primer
gagaagctcacttttaccgga

SEQ ID NO: 3594 - DNA, 20 bp, Artificial Sequence
  PTEN Reverse Primer
gctgccaatccctacagaag

SEQ ID NO: 3595 - DNA, 20 bp, Artificial Sequence
  PTEN Reverse Primer
gttcaaagtgcaatgagcca

SEQ ID NO: 3596 - DNA, 20 bp, Artificial Sequence
  PTEN Reverse Primer
ctcagcaccaaaaggtgtca

SEQ ID NO: 3597 - DNA, 20 bp, Artificial Sequence
  PTEN Reverse Primer
agttgaaccaaatggtggga

SEQ ID NO: 3598 - DNA, 23 bp, Artificial Sequence
  PTEN Reverse Primer
attcttaagtctctagcatgcgg

SEQ ID NO: 3599 - DNA, 23 bp, Artificial Sequence
  PTEN Reverse Primer
cgaaatatggattctgtatctgc

SEQ ID NO: 3600 - DNA, 21 bp, Artificial Sequence
  PTEN Reverse Primer
ttccagctacttggattctgg

SEQ ID NO: 3601 - DNA, 26 bp, Artificial Sequence
  PTEN Reverse Primer
cagatgaagggaaataagaattagga

SEQ ID NO: 3602 - DNA, 24 bp, Artificial Sequence
  PTEN Reverse Primer
cagtacctggcaaagtaatcttgt

SEQ ID NO: 3603 - DNA, 24 bp, Artificial Sequence
  PTEN Reverse Primer
gaagctccagtttcttacatgaca

SEQ ID NO: 3604 - DNA, 25 bp, Artificial Sequence
  PTEN Reverse Primer
aaaccaaaaatacaatctcacaaga

SEQ ID NO: 3605 - DNA, 20 bp, Artificial Sequence
  PTEN Reverse Primer
tgtaggaggtagccctgtgc

SEQ ID NO: 3606 - DNA, 19 bp, Artificial Sequence
  PTEN Reverse Primer
acgggaggacaatcaaagg

SEQ ID NO: 3607 - DNA, 20 bp, Artificial Sequence
  PTEN Reverse Primer
cttggttgggccttctctaa

SEQ ID NO: 3608 - DNA, 21 bp, Artificial Sequence
  PTEN Reverse Primer
cccttctccctactttcctca

SEQ ID NO: 3609 - DNA, 20 bp, Artificial Sequence
  PTEN Reverse Primer
ccaaggggaggtagctaagg

SEQ ID NO: 3610 - DNA, 21 bp, Artificial Sequence
  PTEN Reverse Primer
ttttgtgtgcagcattgaaag

SEQ ID NO: 3611 - DNA, 21 bp, Artificial Sequence
  PTEN Reverse Primer
agtgaacaatttcagcaccaa

SEQ ID NO: 3612 - DNA, 22 bp, Artificial Sequence
  PTEN Reverse Primer
ttttatgaaagacaaggtggca

SEQ ID NO: 3613 - DNA, 20 bp, Artificial Sequence
  PTEN Reverse Primer
atgccatttttccatttcca

SEQ ID NO: 3614 - DNA, 21 bp, Artificial Sequence
  PTEN Reverse Primer
ggcccaactgtaagctttctt

SEQ ID NO: 3615 - DNA, 23 bp, Artificial Sequence
  PTEN Reverse Primer
tggactttttcaggactagaacg

SEQ ID NO: 3616 - DNA, 23 bp, Artificial Sequence
  PTEN Reverse Primer
ccttactatgctttgttgaaagg

SEQ ID NO: 3617 - DNA, 20 bp, Artificial Sequence
  PTEN Reverse Primer
ctcaatggaaatggtgatgg

SEQ ID NO: 3618 - DNA, 22 bp, Artificial Sequence
  PTEN Reverse Primer
ttcttgtttccattcacaaaca

SEQ ID NO: 3619 - DNA, 21 bp, Artificial Sequence
  PTEN Reverse Primer
gactggctacccacattctga

SEQ ID NO: 3620 - DNA, 20 bp, Artificial Sequence
  PTEN Reverse Primer
tctgatgcaatggaacatcc

SEQ ID NO: 3621 - DNA, 23 bp, Artificial Sequence
  PTEN Reverse Primer
tttaacacaattccaaatgcaaa

SEQ ID NO: 3622 - DNA, 22 bp, Artificial Sequence
  PTEN Reverse Primer
ttgcatgtttttataagcccac

SEQ ID NO: 3623 - DNA, 20 bp, Artificial Sequence
  PTEN Reverse Primer
tcctcatgcaacagaggaaa

SEQ ID NO: 3624 - DNA, 20 bp, Artificial Sequence
  PTEN Reverse Primer
cacattaggacatgagggca

SEQ ID NO: 3625 - DNA, 20 bp, Artificial Sequence
  PTEN Reverse Primer
tgccaactttggtttaatgc

SEQ ID NO: 3626 - DNA, 20 bp, Artificial Sequence
  PTEN Reverse Primer
aactcttcaagggcagggat

SEQ ID NO: 3627 - DNA, 20 bp, Artificial Sequence
  RARA Forward Primer
tcctgaatcgagctgagagg

SEQ ID NO: 3628 - DNA, 20 bp, Artificial Sequence
  RARA Forward Primer
acccttcctgcatttctcct

SEQ ID NO: 3629 - DNA, 20 bp, Artificial Sequence
  RARA Forward Primer
tggaggttgtgagcattttg

SEQ ID NO: 3630 - DNA, 20 bp, Artificial Sequence
  RARA Forward Primer
gctcagtccagatggctagg

SEQ ID NO: 3631 - DNA, 20 bp, Artificial Sequence
  RARA Forward Primer
ggtgggtttacaggaagggt

SEQ ID NO: 3632 - DNA, 20 bp, Artificial Sequence
  RARA Forward Primer
ggcttcagacttcgttctgg

SEQ ID NO: 3633 - DNA, 20 bp, Artificial Sequence
  RARA Forward Primer
agtaatggctgggggaatct

SEQ ID NO: 3634 - DNA, 20 bp, Artificial Sequence
  RARA Forward Primer
tgagatatgtgtggcggcta

SEQ ID NO: 3635 - DNA, 20 bp, Artificial Sequence
  RARA Forward Primer
cactttgcctcatctagccc

SEQ ID NO: 3636 - DNA, 20 bp, Artificial Sequence
  RARA Forward Primer
gcctccaggcttctctcttt

SEQ ID NO: 3637 - DNA, 20 bp, Artificial Sequence
  RARA Forward Primer
ctaggaaaggggtgtgggat

SEQ ID NO: 3638 - DNA, 20 bp, Artificial Sequence
  RARA Forward Primer
aagagtcctggcaccctaca

SEQ ID NO: 3639 - DNA, 20 bp, Artificial Sequence
  RARA Forward Primer
gagttgggtttgtttgggtg

SEQ ID NO: 3640 - DNA, 20 bp, Artificial Sequence
  RARA Forward Primer
tgtcttctgcctcaggctct

SEQ ID NO: 3641 - DNA, 20 bp, Artificial Sequence
  RARA Forward Primer
tcatgccactcaacatctcc

SEQ ID NO: 3642 - DNA, 20 bp, Artificial Sequence
  RARA Forward Primer
ccaactcttctgggacttgc

SEQ ID NO: 3643 - DNA, 20 bp, Artificial Sequence
  RARA Forward Primer
ccccatcagctctggtaact

SEQ ID NO: 3644 - DNA, 20 bp, Artificial Sequence
  RARA Forward Primer
caaaacttgttggcactgga

SEQ ID NO: 3645 - DNA, 19 bp, Artificial Sequence
  RARA Forward Primer
gccaggctcagctcttctc

SEQ ID NO: 3646 - DNA, 20 bp, Artificial Sequence
  RARA Forward Primer
cctgccattgacaagctgta

SEQ ID NO: 3647 - DNA, 20 bp, Artificial Sequence
  RARA Forward Primer
cttcaggagtttccacaggc

SEQ ID NO: 3648 - DNA, 20 bp, Artificial Sequence
  RARA Forward Primer
acccttctctcctcctgcat

SEQ ID NO: 3649 - DNA, 20 bp, Artificial Sequence
  RARA Forward Primer
ccacacatggggctacttct

SEQ ID NO: 3650 - DNA, 20 bp, Artificial Sequence
  RARA Forward Primer
gcatgcttgcattcttgtgt

SEQ ID NO: 3651 - DNA, 20 bp, Artificial Sequence
  RARA Forward Primer
gtttgcggatgaatctggac

SEQ ID NO: 3652 - DNA, 20 bp, Artificial Sequence
  RARA Forward Primer
ccttccagtgggaagttctg

SEQ ID NO: 3653 - DNA, 20 bp, Artificial Sequence
  RARA Forward Primer
agagctttcctggcttctcc

SEQ ID NO: 3654 - DNA, 20 bp, Artificial Sequence
  RARA Forward Primer
ttgacagctagggcaggagt

SEQ ID NO: 3655 - DNA, 20 bp, Artificial Sequence
  RARA Forward Primer
ccacggtccagtcttcaact

SEQ ID NO: 3656 - DNA, 19 bp, Artificial Sequence
  RARA Forward Primer
ggttagggcagacgctgtg

SEQ ID NO: 3657 - DNA, 18 bp, Artificial Sequence
  RARA Forward Primer
tctgtgagtctgcctgcg

SEQ ID NO: 3658 - DNA, 20 bp, Artificial Sequence
  RARA Forward Primer
gtaggggtgttcctgggtct

SEQ ID NO: 3659 - DNA, 19 bp, Artificial Sequence
  RARA Forward Primer
gcactggcctattgtcagg

SEQ ID NO: 3660 - DNA, 20 bp, Artificial Sequence
  RARA Forward Primer
gccttctgtctgatggctgt

SEQ ID NO: 3661 - DNA, 20 bp, Artificial Sequence
  RARA Forward Primer
tacagggctccatgaagagg

SEQ ID NO: 3662 - DNA, 20 bp, Artificial Sequence
  RARA Forward Primer
ccatgtggtgtcctgaaaga

SEQ ID NO: 3663 - DNA, 20 bp, Artificial Sequence
  RARA Forward Primer
cctgccaccccatctaagta

SEQ ID NO: 3664 - DNA, 20 bp, Artificial Sequence
  RARA Forward Primer
tcccaaaatacaaaccccaa

SEQ ID NO: 3665 - DNA, 20 bp, Artificial Sequence
  RARA Forward Primer
tactcccctctccaccctct

SEQ ID NO: 3666 - DNA, 20 bp, Artificial Sequence
  RARA Forward Primer
cttcgtctggatcttgcctc

SEQ ID NO: 3667 - DNA, 20 bp, Artificial Sequence
  RARA Forward Primer
gaccctccagcacacatcat

SEQ ID NO: 3668 - DNA, 20 bp, Artificial Sequence
  RARA Forward Primer
atatgcctttcccttctgcc

SEQ ID NO: 3669 - DNA, 20 bp, Artificial Sequence
  RARA Forward Primer
acaaaaggcaggggagaagt

SEQ ID NO: 3670 - DNA, 20 bp, Artificial Sequence
  RARA Forward Primer
cacacctaccttggagtggc

SEQ ID NO: 3671 - DNA, 20 bp, Artificial Sequence
  RARA Forward Primer
tccagctccaggtaggagaa

SEQ ID NO: 3672 - DNA, 20 bp, Artificial Sequence
  RARA Forward Primer
ggacttgactagggggtcct

SEQ ID NO: 3673 - DNA, 20 bp, Artificial Sequence
  RARA Forward Primer
tctgatggaaaccaccttcc

SEQ ID NO: 3674 - DNA, 20 bp, Artificial Sequence
  RARA Forward Primer
ggatggtgaggggaagagat

SEQ ID NO: 3675 - DNA, 20 bp, Artificial Sequence
  RARA Forward Primer
ccattgtgagagagctgtgc

SEQ ID NO: 3676 - DNA, 20 bp, Artificial Sequence
  RARA Forward Primer
tcttgaggcctgaattaccc

SEQ ID NO: 3677 - DNA, 20 bp, Artificial Sequence
  RARA Forward Primer
gtcaccctttctgcctggta

SEQ ID NO: 3678 - DNA, 20 bp, Artificial Sequence
  RARA Forward Primer
cagaccctggtgaacagaca

SEQ ID NO: 3679 - DNA, 20 bp, Artificial Sequence
  RARA Forward Primer
atgcttaggaaacccccagt

SEQ ID NO: 3680 - DNA, 20 bp, Artificial Sequence
  RARA Forward Primer
gaccctgggaaatgggtaat

SEQ ID NO: 3681 - DNA, 20 bp, Artificial Sequence
  RARA Forward Primer
tctctctctcaggggagggt

SEQ ID NO: 3682 - DNA, 20 bp, Artificial Sequence
  RARA Forward Primer
cccttggcctatttctgtga

SEQ ID NO: 3683 - DNA, 20 bp, Artificial Sequence
  RARA Forward Primer
gttgaggtggctgtggtttt

SEQ ID NO: 3684 - DNA, 20 bp, Artificial Sequence
  RARA Forward Primer
acagtttgggagactgtggg

SEQ ID NO: 3685 - DNA, 20 bp, Artificial Sequence
  RARA Forward Primer
agcctcttcttcccttgcat

SEQ ID NO: 3686 - DNA, 20 bp, Artificial Sequence
  RARA Forward Primer
ctccctcagttccacacagg

SEQ ID NO: 3687 - DNA, 20 bp, Artificial Sequence
  RARA Forward Primer
tttgctcttgttgctgccta

SEQ ID NO: 3688 - DNA, 20 bp, Artificial Sequence
  RARA Forward Primer
tccttgccctcctacacatc

SEQ ID NO: 3689 - DNA, 20 bp, Artificial Sequence
  RARA Forward Primer
gtgccaatgctttagggaag

SEQ ID NO: 3690 - DNA, 20 bp, Artificial Sequence
  RARA Forward Primer
cctgcttccaggtcatctct

SEQ ID NO: 3691 - DNA, 20 bp, Artificial Sequence
  RARA Forward Primer
ctcttgagacatcccccaac

SEQ ID NO: 3692 - DNA, 20 bp, Artificial Sequence
  RARA Forward Primer
cctccctacgccttcttctt

SEQ ID NO: 3693 - DNA, 20 bp, Artificial Sequence
  RARA Forward Primer
aggtcttctccagttggggt

SEQ ID NO: 3694 - DNA, 20 bp, Artificial Sequence
  RARA Forward Primer
agagtgagagcagcacacca

SEQ ID NO: 3695 - DNA, 20 bp, Artificial Sequence
  RARA Forward Primer
aggggtctcagtacccttcg

SEQ ID NO: 3696 - DNA, 19 bp, Artificial Sequence
  RARA Forward Primer
agctgctgacctgggaaac

SEQ ID NO: 3697 - DNA, 20 bp, Artificial Sequence
  RARA Forward Primer
gtgtttctttgtgttccccg

SEQ ID NO: 3698 - DNA, 20 bp, Artificial Sequence
  RARA Forward Primer
ctaacccaggtgatggcaac

SEQ ID NO: 3699 - DNA, 20 bp, Artificial Sequence
  RARA Forward Primer
caacaacttctctccctgcc

SEQ ID NO: 3700 - DNA, 20 bp, Artificial Sequence
  RARA Forward Primer
tctgcccataccctttttgt

SEQ ID NO: 3701 - DNA, 20 bp, Artificial Sequence
  RARA Forward Primer
ttctgtgtgcactacgggtc

SEQ ID NO: 3702 - DNA, 20 bp, Artificial Sequence
  RARA Forward Primer
taggtgggagctggagagaa

SEQ ID NO: 3703 - DNA, 20 bp, Artificial Sequence
  RARA Forward Primer
ctcttgggtgtgggaagtgt

SEQ ID NO: 3704 - DNA, 20 bp, Artificial Sequence
  RARA Forward Primer
gaagttgcaagccatcaaca

SEQ ID NO: 3705 - DNA, 20 bp, Artificial Sequence
  RARA Forward Primer
tggacaataggagggacagc

SEQ ID NO: 3706 - DNA, 20 bp, Artificial Sequence
  RARA Forward Primer
gatgtgttgcttatggggct

SEQ ID NO: 3707 - DNA, 20 bp, Artificial Sequence
  RARA Forward Primer
gagctgggtactgtcttggg

SEQ ID NO: 3708 - DNA, 20 bp, Artificial Sequence
  RARA Forward Primer
aaggaacatcttgaatgccg

SEQ ID NO: 3709 - DNA, 20 bp, Artificial Sequence
  RARA Forward Primer
cagagccttgctccatcatt

SEQ ID NO: 3710 - DNA, 20 bp, Artificial Sequence
  RARA Forward Primer
agtttcctaggccaagccac

SEQ ID NO: 3711 - DNA, 20 bp, Artificial Sequence
  RARA Forward Primer
gcacagactcgccctttaac

SEQ ID NO: 3712 - DNA, 20 bp, Artificial Sequence
  RARA Forward Primer
gtaagaacatgggctttggc

SEQ ID NO: 3713 - DNA, 20 bp, Artificial Sequence
  RARA Forward Primer
taggataccccctcctccag

SEQ ID NO: 3714 - DNA, 20 bp, Artificial Sequence
  RARA Forward Primer
gtgtctcattccgacacagc

SEQ ID NO: 3715 - DNA, 20 bp, Artificial Sequence
  RARA Forward Primer
tgtgttaaggggaggacacc

SEQ ID NO: 3716 - DNA, 18 bp, Artificial Sequence
  RARA Forward Primer
aatgggttaagccagggg

SEQ ID NO: 3717 - DNA, 20 bp, Artificial Sequence
  RARA Forward Primer
gaggaggaagtgctcgttga

SEQ ID NO: 3718 - DNA, 20 bp, Artificial Sequence
  RARA Forward Primer
gacttagacgcggggacttc

SEQ ID NO: 3719 - DNA, 20 bp, Artificial Sequence
  RARA Forward Primer
ggaatggctcaaaccactgt

SEQ ID NO: 3720 - DNA, 20 bp, Artificial Sequence
  RARA Forward Primer
aaaggtcctgtctgtgtggg

SEQ ID NO: 3721 - DNA, 20 bp, Artificial Sequence
  RARA Forward Primer
cctaaccttccatcttggca

SEQ ID NO: 3722 - DNA, 20 bp, Artificial Sequence
  RARA Forward Primer
gccaccgagtccttttgtta

SEQ ID NO: 3723 - DNA, 20 bp, Artificial Sequence
  RARA Forward Primer
cgcaagggggttattgttag

SEQ ID NO: 3724 - DNA, 20 bp, Artificial Sequence
  RARA Forward Primer
cctgagatggacagacagcc

SEQ ID NO: 3725 - DNA, 20 bp, Artificial Sequence
  RARA Forward Primer
cctagggggatagttggagc

SEQ ID NO: 3726 - DNA, 20 bp, Artificial Sequence
  RARA Forward Primer
gctgtgaggttgggagtgat

SEQ ID NO: 3727 - DNA, 20 bp, Artificial Sequence
  RARA Forward Primer
tctgtctcccaccaatctcc

SEQ ID NO: 3728 - DNA, 20 bp, Artificial Sequence
  RARA Forward Primer
ttcctgggtcagttccagtc

SEQ ID NO: 3729 - DNA, 20 bp, Artificial Sequence
  RARA Forward Primer
ctcagagctgggttacctgg

SEQ ID NO: 3730 - DNA, 20 bp, Artificial Sequence
  RARA Forward Primer
ctctcatcctggtatccccc

SEQ ID NO: 3731 - DNA, 20 bp, Artificial Sequence
  RARA Forward Primer
cccaccagtctggattgtct

SEQ ID NO: 3732 - DNA, 20 bp, Artificial Sequence
  RARA Forward Primer
ggggaggtcaggagagaatc

SEQ ID NO: 3733 - DNA, 20 bp, Artificial Sequence
  RARA Forward Primer
cctttaaatgccagccagtc

SEQ ID NO: 3734 - DNA, 20 bp, Artificial Sequence
  RARA Forward Primer
atggatagcccctacccaac

SEQ ID NO: 3735 - DNA, 20 bp, Artificial Sequence
  RARA Forward Primer
gcccagcatttgtgactctt

SEQ ID NO: 3736 - DNA, 20 bp, Artificial Sequence
  RARA Forward Primer
ggggtcctaggagtccagag

SEQ ID NO: 3737 - DNA, 20 bp, Artificial Sequence
  RARA Forward Primer
ggatgtccccacttctgtgt

SEQ ID NO: 3738 - DNA, 20 bp, Artificial Sequence
  RARA Forward Primer
caggaggcagttaggagcag

SEQ ID NO: 3739 - DNA, 20 bp, Artificial Sequence
  RARA Forward Primer
agctctgggctgctcttcag

SEQ ID NO: 3740 - DNA, 20 bp, Artificial Sequence
  RARA Forward Primer
gctcctgagtgcatgtgtgt

SEQ ID NO: 3741 - DNA, 19 bp, Artificial Sequence
  RARA Forward Primer
ggttgggggaagactcctg

SEQ ID NO: 3742 - DNA, 20 bp, Artificial Sequence
  RARA Forward Primer
cctgggattcagagttggaa

SEQ ID NO: 3743 - DNA, 20 bp, Artificial Sequence
  RARA Forward Primer
ggttctgactgttgcacgaa

SEQ ID NO: 3744 - DNA, 20 bp, Artificial Sequence
  RARA Forward Primer
cactctccctctccctctcc

SEQ ID NO: 3745 - DNA, 20 bp, Artificial Sequence
  RARA Forward Primer
ttgtcagctccccagctaat

SEQ ID NO: 3746 - DNA, 20 bp, Artificial Sequence
  RARA Forward Primer
acttgatgtgtgggttgggt

SEQ ID NO: 3747 - DNA, 20 bp, Artificial Sequence
  RARA Forward Primer
ggagctcattgagaaggtgc

SEQ ID NO: 3748 - DNA, 20 bp, Artificial Sequence
  RARA Forward Primer
gtagagggggaggtgagagg

SEQ ID NO: 3749 - DNA, 20 bp, Artificial Sequence
  RARA Forward Primer
tctttcaggccacctctgtt

SEQ ID NO: 3750 - DNA, 20 bp, Artificial Sequence
  RARA Forward Primer
ttgatgggaggattacggtg

SEQ ID NO: 3751 - DNA, 20 bp, Artificial Sequence
  RARA Forward Primer
ggtggttctgcttcctcaga

SEQ ID NO: 3752 - DNA, 20 bp, Artificial Sequence
  RARA Forward Primer
gccaggacaatacgacacct

SEQ ID NO: 3753 - DNA, 20 bp, Artificial Sequence
  RARA Forward Primer
gatccctagcacacagcaca

SEQ ID NO: 3754 - DNA, 20 bp, Artificial Sequence
  RARA Forward Primer
tgttggagaactcagagggc

SEQ ID NO: 3755 - DNA, 20 bp, Artificial Sequence
  RARA Forward Primer
tcgtgttcatcaagacaccc

SEQ ID NO: 3756 - DNA, 20 bp, Artificial Sequence
  RARA Forward Primer
ccactctcctttcatgtccc

SEQ ID NO: 3757 - DNA, 20 bp, Artificial Sequence
  RARA Reverse Primer
caggactacagtgagcgacg

SEQ ID NO: 3758 - DNA, 20 bp, Artificial Sequence
  RARA Reverse Primer
gaaatcccttgggaaagctc

SEQ ID NO: 3759 - DNA, 20 bp, Artificial Sequence
  RARA Reverse Primer
ctctggtatccctccccttc

SEQ ID NO: 3760 - DNA, 20 bp, Artificial Sequence
  RARA Reverse Primer
cccaccacaggagagaaaaa

SEQ ID NO: 3761 - DNA, 20 bp, Artificial Sequence
  RARA Reverse Primer
tggaagaatgcagagcacac

SEQ ID NO: 3762 - DNA, 20 bp, Artificial Sequence
  RARA Reverse Primer
tagtggcaatgtccctgctt

SEQ ID NO: 3763 - DNA, 20 bp, Artificial Sequence
  RARA Reverse Primer
gaagaaatgcctggtggaga

SEQ ID NO: 3764 - DNA, 20 bp, Artificial Sequence
  RARA Reverse Primer
cctgaggaccttggtgtgtt

SEQ ID NO: 3765 - DNA, 20 bp, Artificial Sequence
  RARA Reverse Primer
aaaggaggaaggaaaccagc

SEQ ID NO: 3766 - DNA, 20 bp, Artificial Sequence
  RARA Reverse Primer
tttgagggcagaaggaattg

SEQ ID NO: 3767 - DNA, 20 bp, Artificial Sequence
  RARA Reverse Primer
ccaggggactgaccaactaa

SEQ ID NO: 3768 - DNA, 20 bp, Artificial Sequence
  RARA Reverse Primer
cactgagctgtggtgaggaa

SEQ ID NO: 3769 - DNA, 20 bp, Artificial Sequence
  RARA Reverse Primer
ttcttttgttggggagatgg

SEQ ID NO: 3770 - DNA, 20 bp, Artificial Sequence
  RARA Reverse Primer
ttggattaaggcctgtctgg

SEQ ID NO: 3771 - DNA, 20 bp, Artificial Sequence
  RARA Reverse Primer
aacagcctcaatccatttgc

SEQ ID NO: 3772 - DNA, 20 bp, Artificial Sequence
  RARA Reverse Primer
agcctactgccctttaagcc

SEQ ID NO: 3773 - DNA, 20 bp, Artificial Sequence
  RARA Reverse Primer
tacccaggctgtgagtctcc

SEQ ID NO: 3774 - DNA, 20 bp, Artificial Sequence
  RARA Reverse Primer
caccaccaagactgtgatgc

SEQ ID NO: 3775 - DNA, 20 bp, Artificial Sequence
  RARA Reverse Primer
cctggctctgcaggtttatg

SEQ ID NO: 3776 - DNA, 20 bp, Artificial Sequence
  RARA Reverse Primer
cagctccagctgactcctct

SEQ ID NO: 3777 - DNA, 20 bp, Artificial Sequence
  RARA Reverse Primer
tgcacacaggagataggctg

SEQ ID NO: 3778 - DNA, 20 bp, Artificial Sequence
  RARA Reverse Primer
cctgtccagggaaaccagta

SEQ ID NO: 3779 - DNA, 20 bp, Artificial Sequence
  RARA Reverse Primer
ccttcaggtacacctgccat

SEQ ID NO: 3780 - DNA, 19 bp, Artificial Sequence
  RARA Reverse Primer
accgcttaaccccttaccc

SEQ ID NO: 3781 - DNA, 20 bp, Artificial Sequence
  RARA Reverse Primer
aggtaggacaagccaggatg

SEQ ID NO: 3782 - DNA, 20 bp, Artificial Sequence
  RARA Reverse Primer
catctgagagacccccagtc

SEQ ID NO: 3783 - DNA, 20 bp, Artificial Sequence
  RARA Reverse Primer
tctttccccaaacacctctg

SEQ ID NO: 3784 - DNA, 20 bp, Artificial Sequence
  RARA Reverse Primer
gagaatccctccctcagacc

SEQ ID NO: 3785 - DNA, 20 bp, Artificial Sequence
  RARA Reverse Primer
ctgaaactttacccggagcc

SEQ ID NO: 3786 - DNA, 18 bp, Artificial Sequence
  RARA Reverse Primer
agttgggaagcccaggaa

SEQ ID NO: 3787 - DNA, 20 bp, Artificial Sequence
  RARA Reverse Primer
caggagggaaaaagagaggg

SEQ ID NO: 3788 - DNA, 20 bp, Artificial Sequence
  RARA Reverse Primer
gagatgaggggacatagcca

SEQ ID NO: 3789 - DNA, 22 bp, Artificial Sequence
  RARA Reverse Primer
cctggttacagaagacagagcc

SEQ ID NO: 3790 - DNA, 20 bp, Artificial Sequence
  RARA Reverse Primer
cccaaaacaatcttgcccta

SEQ ID NO: 3791 - DNA, 20 bp, Artificial Sequence
  RARA Reverse Primer
acagccacaaactccctgac

SEQ ID NO: 3792 - DNA, 20 bp, Artificial Sequence
  RARA Reverse Primer
gccaggattaagccatttca

SEQ ID NO: 3793 - DNA, 20 bp, Artificial Sequence
  RARA Reverse Primer
cacatcacacggttctgagg

SEQ ID NO: 3794 - DNA, 20 bp, Artificial Sequence
  RARA Reverse Primer
ctgagcaagcggagattacc

SEQ ID NO: 3795 - DNA, 20 bp, Artificial Sequence
  RARA Reverse Primer
agactggggacagacacacc

SEQ ID NO: 3796 - DNA, 20 bp, Artificial Sequence
  RARA Reverse Primer
gcacctatttcatttcccca

SEQ ID NO: 3797 - DNA, 20 bp, Artificial Sequence
  RARA Reverse Primer
agttatagggctggggttgg

SEQ ID NO: 3798 - DNA, 20 bp, Artificial Sequence
  RARA Reverse Primer
cagagaaccacccccatcta

SEQ ID NO: 3799 - DNA, 20 bp, Artificial Sequence
  RARA Reverse Primer
gacacatggagactgcctga

SEQ ID NO: 3800 - DNA, 20 bp, Artificial Sequence
  RARA Reverse Primer
cccctcttttccacttcctg

SEQ ID NO: 3801 - DNA, 20 bp, Artificial Sequence
  RARA Reverse Primer
tagctccttccccacaagaa

SEQ ID NO: 3802 - DNA, 20 bp, Artificial Sequence
  RARA Reverse Primer
acaagggctgcaaaatcagt

SEQ ID NO: 3803 - DNA, 20 bp, Artificial Sequence
  RARA Reverse Primer
atggccttccccttagagaa

SEQ ID NO: 3804 - DNA, 20 bp, Artificial Sequence
  RARA Reverse Primer
ctgcagggaatccaggaata

SEQ ID NO: 3805 - DNA, 20 bp, Artificial Sequence
  RARA Reverse Primer
aaatgtgtggaccatacgca

SEQ ID NO: 3806 - DNA, 20 bp, Artificial Sequence
  RARA Reverse Primer
tctaggaggaggaagtgggg

SEQ ID NO: 3807 - DNA, 20 bp, Artificial Sequence
  RARA Reverse Primer
taggggaaggaggaagccta

SEQ ID NO: 3808 - DNA, 20 bp, Artificial Sequence
  RARA Reverse Primer
ttccaggaaaacacactccc

SEQ ID NO: 3809 - DNA, 20 bp, Artificial Sequence
  RARA Reverse Primer
ctcaggacagaagagcaggg

SEQ ID NO: 3810 - DNA, 20 bp, Artificial Sequence
  RARA Reverse Primer
ctgtgcgatttcagacagga

SEQ ID NO: 3811 - DNA, 20 bp, Artificial Sequence
  RARA Reverse Primer
actctgcctcagaaggtcca

SEQ ID NO: 3812 - DNA, 20 bp, Artificial Sequence
  RARA Reverse Primer
acttcaatccccactacccc

SEQ ID NO: 3813 - DNA, 19 bp, Artificial Sequence
  RARA Reverse Primer
ctctctcaaggtgaggccc

SEQ ID NO: 3814 - DNA, 20 bp, Artificial Sequence
  RARA Reverse Primer
acagaaaacatctgggtggg

SEQ ID NO: 3815 - DNA, 20 bp, Artificial Sequence
  RARA Reverse Primer
tcatagggcctctctcctca

SEQ ID NO: 3816 - DNA, 20 bp, Artificial Sequence
  RARA Reverse Primer
ccctataccttgccactcca

SEQ ID NO: 3817 - DNA, 20 bp, Artificial Sequence
  RARA Reverse Primer
aaacacatgaactggggtgg

SEQ ID NO: 3818 - DNA, 20 bp, Artificial Sequence
  RARA Reverse Primer
aatgactcctaagccagggg

SEQ ID NO: 3819 - DNA, 19 bp, Artificial Sequence
  RARA Reverse Primer
agacagggacagagcccag

SEQ ID NO: 3820 - DNA, 20 bp, Artificial Sequence
  RARA Reverse Primer
agatgccactcctagatggg

SEQ ID NO: 3821 - DNA, 20 bp, Artificial Sequence
  RARA Reverse Primer
tcagaagggaggcagacagt

SEQ ID NO: 3822 - DNA, 19 bp, Artificial Sequence
  RARA Reverse Primer
acagcagaacagacgtgcc

SEQ ID NO: 3823 - DNA, 20 bp, Artificial Sequence
  RARA Reverse Primer
tgtgtgtccagtccttggag

SEQ ID NO: 3824 - DNA, 20 bp, Artificial Sequence
  RARA Reverse Primer
ctcctgggacactcacccta

SEQ ID NO: 3825 - DNA, 19 bp, Artificial Sequence
  RARA Reverse Primer
attctgctgcttccaccct

SEQ ID NO: 3826 - DNA, 20 bp, Artificial Sequence
  RARA Reverse Primer
ccagggacaaagagactccc

SEQ ID NO: 3827 - DNA, 20 bp, Artificial Sequence
  RARA Reverse Primer
gcctctccccatcactaaca

SEQ ID NO: 3828 - DNA, 20 bp, Artificial Sequence
  RARA Reverse Primer
gttaccaggatgggaagcct

SEQ ID NO: 3829 - DNA, 20 bp, Artificial Sequence
  RARA Reverse Primer
gaggccaggcatgtgataat

SEQ ID NO: 3830 - DNA, 20 bp, Artificial Sequence
  RARA Reverse Primer
cacagtgacctggagagggt

SEQ ID NO: 3831 - DNA, 20 bp, Artificial Sequence
  RARA Reverse Primer
ctgtgccctaagtcactccc

SEQ ID NO: 3832 - DNA, 20 bp, Artificial Sequence
  RARA Reverse Primer
tagatggtggaaaacagccc

SEQ ID NO: 3833 - DNA, 20 bp, Artificial Sequence
  RARA Reverse Primer
cttccaggacaggatggaga

SEQ ID NO: 3834 - DNA, 20 bp, Artificial Sequence
  RARA Reverse Primer
agcagggaaggaggcagtat

SEQ ID NO: 3835 - DNA, 20 bp, Artificial Sequence
  RARA Reverse Primer
tcttgtccagagggaacctg

SEQ ID NO: 3836 - DNA, 20 bp, Artificial Sequence
  RARA Reverse Primer
tgacagccaaaggttgagtg

SEQ ID NO: 3837 - DNA, 20 bp, Artificial Sequence
  RARA Reverse Primer
tatccctccctcagctcctt

SEQ ID NO: 3838 - DNA, 20 bp, Artificial Sequence
  RARA Reverse Primer
cctgccatcaaagaccttgt

SEQ ID NO: 3839 - DNA, 20 bp, Artificial Sequence
  RARA Reverse Primer
tcctgagactgcaaagcaga

SEQ ID NO: 3840 - DNA, 20 bp, Artificial Sequence
  RARA Reverse Primer
gcctcagtaaggcttttgga

SEQ ID NO: 3841 - DNA, 20 bp, Artificial Sequence
  RARA Reverse Primer
gagcaacagccattaagcaa

SEQ ID NO: 3842 - DNA, 21 bp, Artificial Sequence
  RARA Reverse Primer
catgctacccaaggacattct

SEQ ID NO: 3843 - DNA, 20 bp, Artificial Sequence
  RARA Reverse Primer
cccaaggtgtctcctagctg

SEQ ID NO: 3844 - DNA, 18 bp, Artificial Sequence
  RARA Reverse Primer
cacctccgagtgacccac

SEQ ID NO: 3845 - DNA, 20 bp, Artificial Sequence
  RARA Reverse Primer
gtacagagggacgccgagta

SEQ ID NO: 3846 - DNA, 20 bp, Artificial Sequence
  RARA Reverse Primer
cttctccagggattctccgt

SEQ ID NO: 3847 - DNA, 20 bp, Artificial Sequence
  RARA Reverse Primer
ggtgaaaagcagggaagttg

SEQ ID NO: 3848 - DNA, 20 bp, Artificial Sequence
  RARA Reverse Primer
taggaagggattaggggtgg

SEQ ID NO: 3849 - DNA, 20 bp, Artificial Sequence
  RARA Reverse Primer
tgcacttagggttactgggg

SEQ ID NO: 3850 - DNA, 20 bp, Artificial Sequence
  RARA Reverse Primer
gatgaagttgcccctttctg

SEQ ID NO: 3851 - DNA, 20 bp, Artificial Sequence
  RARA Reverse Primer
gtcctcatttccagagcagc

SEQ ID NO: 3852 - DNA, 18 bp, Artificial Sequence
  RARA Reverse Primer
gtacaccctggtgctccg

SEQ ID NO: 3853 - DNA, 20 bp, Artificial Sequence
  RARA Reverse Primer
gggtaagtcctttgcccttc

SEQ ID NO: 3854 - DNA, 20 bp, Artificial Sequence
  RARA Reverse Primer
tgggagaatgagaaaaaggg

SEQ ID NO: 3855 - DNA, 20 bp, Artificial Sequence
  RARA Reverse Primer
ggctcaccaatacactgcct

SEQ ID NO: 3856 - DNA, 20 bp, Artificial Sequence
  RARA Reverse Primer
tggcagtaaaggggagagtg

SEQ ID NO: 3857 - DNA, 20 bp, Artificial Sequence
  RARA Reverse Primer
ccctctgtaccgtccttcct

SEQ ID NO: 3858 - DNA, 20 bp, Artificial Sequence
  RARA Reverse Primer
taactccctgcacacacagg

SEQ ID NO: 3859 - DNA, 20 bp, Artificial Sequence
  RARA Reverse Primer
ccaacagagggtgtttacgg

SEQ ID NO: 3860 - DNA, 20 bp, Artificial Sequence
  RARA Reverse Primer
cgacaagcagaggaagaagg

SEQ ID NO: 3861 - DNA, 20 bp, Artificial Sequence
  RARA Reverse Primer
tggttttctcccacctcatt

SEQ ID NO: 3862 - DNA, 20 bp, Artificial Sequence
  RARA Reverse Primer
gatgacagggaactaggcca

SEQ ID NO: 3863 - DNA, 20 bp, Artificial Sequence
  RARA Reverse Primer
tgaccaggacaatcccagat

SEQ ID NO: 3864 - DNA, 20 bp, Artificial Sequence
  RARA Reverse Primer
ggtctgttcccatcaatgct

SEQ ID NO: 3865 - DNA, 20 bp, Artificial Sequence
  RARA Reverse Primer
taacgcttgaagaggaggga

SEQ ID NO: 3866 - DNA, 20 bp, Artificial Sequence
  RARA Reverse Primer
ggaggggcagttagagacct

SEQ ID NO: 3867 - DNA, 20 bp, Artificial Sequence
  RARA Reverse Primer
ctgccagctggaggatagag

SEQ ID NO: 3868 - DNA, 20 bp, Artificial Sequence
  RARA Reverse Primer
ctctggaggaagaaacgcac

SEQ ID NO: 3869 - DNA, 20 bp, Artificial Sequence
  RARA Reverse Primer
cgacccatcacagacacaga

SEQ ID NO: 3870 - DNA, 20 bp, Artificial Sequence
  RARA Reverse Primer
ccttccagggaaaagacctc

SEQ ID NO: 3871 - DNA, 19 bp, Artificial Sequence
  RARA Reverse Primer
cacagtgggagcagtgcct

SEQ ID NO: 3872 - DNA, 20 bp, Artificial Sequence
  RARA Reverse Primer
gcgtctgtcagcgtcattta

SEQ ID NO: 3873 - DNA, 20 bp, Artificial Sequence
  RARA Reverse Primer
gccatgaaaagagcagaagg

SEQ ID NO: 3874 - DNA, 20 bp, Artificial Sequence
  RARA Reverse Primer
tcgttaccagccgattatcc

SEQ ID NO: 3875 - DNA, 20 bp, Artificial Sequence
  RARA Reverse Primer
aggtgctctgcctcctcttt

SEQ ID NO: 3876 - DNA, 20 bp, Artificial Sequence
  RARA Reverse Primer
tgtttcggtcgtttctcaca

SEQ ID NO: 3877 - DNA, 20 bp, Artificial Sequence
  RARA Reverse Primer
agcaggaggagggagaagag

SEQ ID NO: 3878 - DNA, 20 bp, Artificial Sequence
  RARA Reverse Primer
ggacagcaggaaggagagtg

SEQ ID NO: 3879 - DNA, 20 bp, Artificial Sequence
  RARA Reverse Primer
gcccagagaagttcagcaac

SEQ ID NO: 3880 - DNA, 20 bp, Artificial Sequence
  RARA Reverse Primer
ctccctgagcccagttagtg

SEQ ID NO: 3881 - DNA, 19 bp, Artificial Sequence
  RARA Reverse Primer
cctccaggtctgtgagcct

SEQ ID NO: 3882 - DNA, 20 bp, Artificial Sequence
  RARA Reverse Primer
aaacacgaatgttatccccg

SEQ ID NO: 3883 - DNA, 18 bp, Artificial Sequence
  RARA Reverse Primer
ggctcgaggtgggaagat

SEQ ID NO: 3884 - DNA, 20 bp, Artificial Sequence
  RARA Reverse Primer
atggtcggtagaaaggcaga

SEQ ID NO: 3885 - DNA, 20 bp, Artificial Sequence
  RARA Reverse Primer
ggttggtatggcagggtatg

SEQ ID NO: 3886 - DNA, 19 bp, Artificial Sequence
  RARA Reverse Primer
aggagcctgtcctttcagg

SEQ ID NO: 3887 - DNA, 20 bp, Artificial Sequence
  RPS14 Forward Primer
taatgctgccaccacagttc

SEQ ID NO: 3888 - DNA, 20 bp, Artificial Sequence
  RPS14 Forward Primer
ttcctctcaatccccatgtc

SEQ ID NO: 3889 - DNA, 20 bp, Artificial Sequence
  RPS14 Forward Primer
tgcaagggctcttcagagat

SEQ ID NO: 3890 - DNA, 20 bp, Artificial Sequence
  RPS14 Forward Primer
ctaccgtgtacttcccagcc

SEQ ID NO: 3891 - DNA, 20 bp, Artificial Sequence
  RPS14 Forward Primer
agcttgagaatgatgggcag

SEQ ID NO: 3892 - DNA, 20 bp, Artificial Sequence
  RPS14 Forward Primer
gcctcttccctgagacagaa

SEQ ID NO: 3893 - DNA, 20 bp, Artificial Sequence
  RPS14 Forward Primer
tgagggttttctctggttcc

SEQ ID NO: 3894 - DNA, 20 bp, Artificial Sequence
  RPS14 Forward Primer
tgggcccatatttggtttta

SEQ ID NO: 3895 - DNA, 20 bp, Artificial Sequence
  RPS14 Forward Primer
gctaggaaggaaaccttggc

SEQ ID NO: 3896 - DNA, 20 bp, Artificial Sequence
  RPS14 Forward Primer
tttctaccacgattccagcc

SEQ ID NO: 3897 - DNA, 20 bp, Artificial Sequence
  RPS14 Forward Primer
cctagcaaggtttggcatgt

SEQ ID NO: 3898 - DNA, 20 bp, Artificial Sequence
  RPS14 Forward Primer
tgcaaaacgctgagtaccat

SEQ ID NO: 3899 - DNA, 20 bp, Artificial Sequence
  RPS14 Forward Primer
ggtctggaaggctcctcttt

SEQ ID NO: 3900 - DNA, 20 bp, Artificial Sequence
  RPS14 Forward Primer
agctgtaaggagccaggaga

SEQ ID NO: 3901 - DNA, 20 bp, Artificial Sequence
  RPS14 Forward Primer
caccaggcagtgtaggacag

SEQ ID NO: 3902 - DNA, 20 bp, Artificial Sequence
  RPS14 Forward Primer
ctcttcccctctgactgcac

SEQ ID NO: 3903 - DNA, 20 bp, Artificial Sequence
  RPS14 Forward Primer
agtctgactctcccaccagc

SEQ ID NO: 3904 - DNA, 20 bp, Artificial Sequence
  RPS14 Forward Primer
ctgccctcatggagttcagt

SEQ ID NO: 3905 - DNA, 20 bp, Artificial Sequence
  RPS14 Forward Primer
tgctcctgcaaagggaacta

SEQ ID NO: 3906 - DNA, 20 bp, Artificial Sequence
  RPS14 Forward Primer
atttccagaatccctttccc

SEQ ID NO: 3907 - DNA, 20 bp, Artificial Sequence
  RPS14 Forward Primer
tctagcagcagatgcctgaa

SEQ ID NO: 3908 - DNA, 20 bp, Artificial Sequence
  RPS14 Forward Primer
atccaaaaggcaggctaatg

SEQ ID NO: 3909 - DNA, 20 bp, Artificial Sequence
  RPS14 Forward Primer
gatctctcctctgccttccc

SEQ ID NO: 3910 - DNA, 20 bp, Artificial Sequence
  RPS14 Forward Primer
ccaatttgcagtttctccgt

SEQ ID NO: 3911 - DNA, 20 bp, Artificial Sequence
  RPS14 Forward Primer
acaaacgagattaggcgtgg

SEQ ID NO: 3912 - DNA, 20 bp, Artificial Sequence
  RPS14 Forward Primer
cgcttactctttgtcaggca

SEQ ID NO: 3913 - DNA, 20 bp, Artificial Sequence
  RPS14 Forward Primer
tcacctcactgttgccatgt

SEQ ID NO: 3914 - DNA, 20 bp, Artificial Sequence
  RPS14 Forward Primer
gcagatggagaatgggaatg

SEQ ID NO: 3915 - DNA, 20 bp, Artificial Sequence
  RPS14 Forward Primer
gcagcttcctctcaacaacc

SEQ ID NO: 3916 - DNA, 20 bp, Artificial Sequence
  RPS14 Forward Primer
caggagctctatcccctcct

SEQ ID NO: 3917 - DNA, 20 bp, Artificial Sequence
  RPS14 Forward Primer
agcgctagtctgcgtgtgta

SEQ ID NO: 3918 - DNA, 20 bp, Artificial Sequence
  RPS14 Forward Primer
ccaaggtaggctcactctcg

SEQ ID NO: 3919 - DNA, 20 bp, Artificial Sequence
  RPS14 Forward Primer
tttggagaattggctgaagg

SEQ ID NO: 3920 - DNA, 20 bp, Artificial Sequence
  RPS14 Forward Primer
aggtcacaacttgggtggag

SEQ ID NO: 3921 - DNA, 20 bp, Artificial Sequence
  RPS14 Forward Primer
gaccctgaggatgccagata

SEQ ID NO: 3922 - DNA, 20 bp, Artificial Sequence
  RPS14 Forward Primer
cccacaactgcagctactca

SEQ ID NO: 3923 - DNA, 20 bp, Artificial Sequence
  RPS14 Forward Primer
tactgtgagccaagcactgg

SEQ ID NO: 3924 - DNA, 20 bp, Artificial Sequence
  RPS14 Forward Primer
gggaggtgacatttcagcag

SEQ ID NO: 3925 - DNA, 20 bp, Artificial Sequence
  RPS14 Forward Primer
gtgcagagaggggtcacatt

SEQ ID NO: 3926 - DNA, 20 bp, Artificial Sequence
  RPS14 Forward Primer
attccagacccacccctatc

SEQ ID NO: 3927 - DNA, 20 bp, Artificial Sequence
  RPS14 Forward Primer
cctcactctgaggcaggaag

SEQ ID NO: 3928 - DNA, 20 bp, Artificial Sequence
  RPS14 Forward Primer
catcccagagcaaggaacag

SEQ ID NO: 3929 - DNA, 20 bp, Artificial Sequence
  RPS14 Forward Primer
agagacttgaatccaggcca

SEQ ID NO: 3930 - DNA, 19 bp, Artificial Sequence
  RPS14 Forward Primer
gaagcatcccgtggaaaat

SEQ ID NO: 3931 - DNA, 20 bp, Artificial Sequence
  RPS14 Forward Primer
gacattccttctggcagagc

SEQ ID NO: 3932 - DNA, 20 bp, Artificial Sequence
  RPS14 Forward Primer
atctgggattttgactcccc

SEQ ID NO: 3933 - DNA, 21 bp, Artificial Sequence
  RPS14 Forward Primer
tcatgacatcgctgactgaat

SEQ ID NO: 3934 - DNA, 20 bp, Artificial Sequence
  RPS14 Forward Primer
ctcagcttctcccatgctct

SEQ ID NO: 3935 - DNA, 20 bp, Artificial Sequence
  RPS14 Forward Primer
ctctcagtcctgcctgttcc

SEQ ID NO: 3936 - DNA, 20 bp, Artificial Sequence
  RPS14 Forward Primer
acccagaggtctccacacag

SEQ ID NO: 3937 - DNA, 20 bp, Artificial Sequence
  RPS14 Forward Primer
gagggctgacccttgattct

SEQ ID NO: 3938 - DNA, 20 bp, Artificial Sequence
  RPS14 Forward Primer
agaaagggccttggaatgat

SEQ ID NO: 3939 - DNA, 20 bp, Artificial Sequence
  RPS14 Forward Primer
ttgggagcatttttggattc

SEQ ID NO: 3940 - DNA, 20 bp, Artificial Sequence
  RPS14 Forward Primer
ggccttatcctcaagggact

SEQ ID NO: 3941 - DNA, 20 bp, Artificial Sequence
  RPS14 Forward Primer
gctaaatggtccagggactg

SEQ ID NO: 3942 - DNA, 20 bp, Artificial Sequence
  RPS14 Forward Primer
gcatctttaggctctgcctg

SEQ ID NO: 3943 - DNA, 20 bp, Artificial Sequence
  RPS14 Forward Primer
ttgctgtacctctctgggct

SEQ ID NO: 3944 - DNA, 20 bp, Artificial Sequence
  RPS14 Forward Primer
ttctgcctccactgaagtcc

SEQ ID NO: 3945 - DNA, 19 bp, Artificial Sequence
  RPS14 Forward Primer
ggtggtgctggctgaagta

SEQ ID NO: 3946 - DNA, 20 bp, Artificial Sequence
  RPS14 Forward Primer
ctccctatttcccttctgcc

SEQ ID NO: 3947 - DNA, 20 bp, Artificial Sequence
  RPS14 Forward Primer
caggttggtgagttcagcct

SEQ ID NO: 3948 - DNA, 20 bp, Artificial Sequence
  RPS14 Forward Primer
gcctcgcctccttataggtt

SEQ ID NO: 3949 - DNA, 20 bp, Artificial Sequence
  RPS14 Forward Primer
ttcacctgtctgctcattcg

SEQ ID NO: 3950 - DNA, 20 bp, Artificial Sequence
  RPS14 Forward Primer
cccgtctctttcaactctgc

SEQ ID NO: 3951 - DNA, 20 bp, Artificial Sequence
  RPS14 Forward Primer
atcaccatcaggtccagtcc

SEQ ID NO: 3952 - DNA, 20 bp, Artificial Sequence
  RPS14 Forward Primer
aggctctcattaacctgcca

SEQ ID NO: 3953 - DNA, 22 bp, Artificial Sequence
  RPS14 Forward Primer
caacttgttgggaaagatgaca

SEQ ID NO: 3954 - DNA, 20 bp, Artificial Sequence
  RPS14 Forward Primer
tctcccacattctctctgcc

SEQ ID NO: 3955 - DNA, 20 bp, Artificial Sequence
  RPS14 Forward Primer
tggaagtcgagaaatccagc

SEQ ID NO: 3956 - DNA, 19 bp, Artificial Sequence
  RPS14 Forward Primer
cagccgtggcaggtaagag

SEQ ID NO: 3957 - DNA, 21 bp, Artificial Sequence
  RPS14 Forward Primer
aatgtcactcacgaggaatgc

SEQ ID NO: 3958 - DNA, 20 bp, Artificial Sequence
  RPS14 Forward Primer
ccacttggctttttgcagat

SEQ ID NO: 3959 - DNA, 20 bp, Artificial Sequence
  RPS14 Forward Primer
agaaagtggtggagcttgga

SEQ ID NO: 3960 - DNA, 20 bp, Artificial Sequence
  RPS14 Forward Primer
ggaactccgtaatggtccaa

SEQ ID NO: 3961 - DNA, 20 bp, Artificial Sequence
  RPS14 Forward Primer
gcgcagagtccttgaggata

SEQ ID NO: 3962 - DNA, 20 bp, Artificial Sequence
  RPS14 Forward Primer
tgggtgggggtagataatga

SEQ ID NO: 3963 - DNA, 20 bp, Artificial Sequence
  RPS14 Forward Primer
tgaatggaggagttggaagg

SEQ ID NO: 3964 - DNA, 20 bp, Artificial Sequence
  RPS14 Forward Primer
aactcacaaatgggctctgg

SEQ ID NO: 3965 - DNA, 20 bp, Artificial Sequence
  RPS14 Forward Primer
aaaatgtctgtggctgaggg

SEQ ID NO: 3966 - DNA, 19 bp, Artificial Sequence
  RPS14 Forward Primer
cgggaaatgggacaatagg

SEQ ID NO: 3967 - DNA, 20 bp, Artificial Sequence
  RPS14 Forward Primer
ttttgaccaaagatgggagc

SEQ ID NO: 3968 - DNA, 20 bp, Artificial Sequence
  RPS14 Reverse Primer
atcgtggctttgccacttac

SEQ ID NO: 3969 - DNA, 20 bp, Artificial Sequence
  RPS14 Reverse Primer
ggtaggaaggaagcctggag

SEQ ID NO: 3970 - DNA, 20 bp, Artificial Sequence
  RPS14 Reverse Primer
ccgtgggagcttacatcagt

SEQ ID NO: 3971 - DNA, 18 bp, Artificial Sequence
  RPS14 Reverse Primer
cacacagctggaaagggg

SEQ ID NO: 3972 - DNA, 20 bp, Artificial Sequence
  RPS14 Reverse Primer
tggccagtgagaagtaagca

SEQ ID NO: 3973 - DNA, 20 bp, Artificial Sequence
  RPS14 Reverse Primer
agtgagcctccattcacctg

SEQ ID NO: 3974 - DNA, 20 bp, Artificial Sequence
  RPS14 Reverse Primer
cacacgcaaataaaccacca

SEQ ID NO: 3975 - DNA, 20 bp, Artificial Sequence
  RPS14 Reverse Primer
caaccccaaacaaagtgagg

SEQ ID NO: 3976 - DNA, 20 bp, Artificial Sequence
  RPS14 Reverse Primer
caagttgtggtgtggctcag

SEQ ID NO: 3977 - DNA, 20 bp, Artificial Sequence
  RPS14 Reverse Primer
cacagcttcagaccgttcaa

SEQ ID NO: 3978 - DNA, 20 bp, Artificial Sequence
  RPS14 Reverse Primer
ggagaggatgctgtgtgtca

SEQ ID NO: 3979 - DNA, 20 bp, Artificial Sequence
  RPS14 Reverse Primer
actccactgcgtcttgcttt

SEQ ID NO: 3980 - DNA, 20 bp, Artificial Sequence
  RPS14 Reverse Primer
gagcctgaggagagctgaga

SEQ ID NO: 3981 - DNA, 21 bp, Artificial Sequence
  RPS14 Reverse Primer
tgtcctttcctccattcttga

SEQ ID NO: 3982 - DNA, 20 bp, Artificial Sequence
  RPS14 Reverse Primer
ttattttgaagcattggccc

SEQ ID NO: 3983 - DNA, 20 bp, Artificial Sequence
  RPS14 Reverse Primer
gccaggaagcacaagtaagg

SEQ ID NO: 3984 - DNA, 20 bp, Artificial Sequence
  RPS14 Reverse Primer
tggatttgaggtttgggttt

SEQ ID NO: 3985 - DNA, 20 bp, Artificial Sequence
  RPS14 Reverse Primer
acggccatttagcaagttgt

SEQ ID NO: 3986 - DNA, 20 bp, Artificial Sequence
  RPS14 Reverse Primer
ggctagcagttcaggggatt

SEQ ID NO: 3987 - DNA, 20 bp, Artificial Sequence
  RPS14 Reverse Primer
gctgttggtagtttctgggg

SEQ ID NO: 3988 - DNA, 20 bp, Artificial Sequence
  RPS14 Reverse Primer
ggagcacaggaaaacaggag

SEQ ID NO: 3989 - DNA, 20 bp, Artificial Sequence
  RPS14 Reverse Primer
ttaggccggaagcagtctta

SEQ ID NO: 3990 - DNA, 20 bp, Artificial Sequence
  RPS14 Reverse Primer
tgctggagcctttctatgct

SEQ ID NO: 3991 - DNA, 20 bp, Artificial Sequence
  RPS14 Reverse Primer
tcaaagaaggaaagcaggga

SEQ ID NO: 3992 - DNA, 20 bp, Artificial Sequence
  RPS14 Reverse Primer
ctttcagggaggagcttgtg

SEQ ID NO: 3993 - DNA, 20 bp, Artificial Sequence
  RPS14 Reverse Primer
tcccttattcacaacacccc

SEQ ID NO: 3994 - DNA, 20 bp, Artificial Sequence
  RPS14 Reverse Primer
tgagagggtagggaccattg

SEQ ID NO: 3995 - DNA, 20 bp, Artificial Sequence
  RPS14 Reverse Primer
tccacattcctgcctaaagc

SEQ ID NO: 3996 - DNA, 20 bp, Artificial Sequence
  RPS14 Reverse Primer
ccttgctcttccttcatcca

SEQ ID NO: 3997 - DNA, 20 bp, Artificial Sequence
  RPS14 Reverse Primer
gactccacgacagcttcaca

SEQ ID NO: 3998 - DNA, 20 bp, Artificial Sequence
  RPS14 Reverse Primer
gtgtgagtcctgtgagcacg

SEQ ID NO: 3999 - DNA, 20 bp, Artificial Sequence
  RPS14 Reverse Primer
actcttctctctcctggccc

SEQ ID NO: 4000 - DNA, 20 bp, Artificial Sequence
  RPS14 Reverse Primer
cgttgctcaagcctagaacc

SEQ ID NO: 4001 - DNA, 20 bp, Artificial Sequence
  RPS14 Reverse Primer
gccttcactacctgccagac

SEQ ID NO: 4002 - DNA, 20 bp, Artificial Sequence
  RPS14 Reverse Primer
gaaattacagccccatccct

SEQ ID NO: 4003 - DNA, 20 bp, Artificial Sequence
  RPS14 Reverse Primer
tggggaggttttgaagatga

SEQ ID NO: 4004 - DNA, 20 bp, Artificial Sequence
  RPS14 Reverse Primer
ccacccacatagctctccat

SEQ ID NO: 4005 - DNA, 20 bp, Artificial Sequence
  RPS14 Reverse Primer
tagaggtcacaggctcgtgg

SEQ ID NO: 4006 - DNA, 20 bp, Artificial Sequence
  RPS14 Reverse Primer
caggcaagattctacctcgg

SEQ ID NO: 4007 - DNA, 20 bp, Artificial Sequence
  RPS14 Reverse Primer
ccctcccctactccaacttc

SEQ ID NO: 4008 - DNA, 20 bp, Artificial Sequence
  RPS14 Reverse Primer
caaggactcctatggggtga

SEQ ID NO: 4009 - DNA, 20 bp, Artificial Sequence
  RPS14 Reverse Primer
tatcaggctttgctgggaac

SEQ ID NO: 4010 - DNA, 20 bp, Artificial Sequence
  RPS14 Reverse Primer
aggttgttccgcatggttag

SEQ ID NO: 4011 - DNA, 20 bp, Artificial Sequence
  RPS14 Reverse Primer
gaaactgaggcccagagagg

SEQ ID NO: 4012 - DNA, 20 bp, Artificial Sequence
  RPS14 Reverse Primer
gatctccatttgctgaaggc

SEQ ID NO: 4013 - DNA, 20 bp, Artificial Sequence
  RPS14 Reverse Primer
gcatgctccttgcagaacta

SEQ ID NO: 4014 - DNA, 20 bp, Artificial Sequence
  RPS14 Reverse Primer
tcgggaaactctccctaacc

SEQ ID NO: 4015 - DNA, 20 bp, Artificial Sequence
  RPS14 Reverse Primer
ctgagagtcctggtgtgggt

SEQ ID NO: 4016 - DNA, 20 bp, Artificial Sequence
  RPS14 Reverse Primer
actgccttggaattcgtgac

SEQ ID NO: 4017 - DNA, 20 bp, Artificial Sequence
  RPS14 Reverse Primer
ccatcctgtcaccctctgac

SEQ ID NO: 4018 - DNA, 20 bp, Artificial Sequence
  RPS14 Reverse Primer
gtgtctggggtgagatggag

SEQ ID NO: 4019 - DNA, 20 bp, Artificial Sequence
  RPS14 Reverse Primer
attcccctctgcctatcctg

SEQ ID NO: 4020 - DNA, 20 bp, Artificial Sequence
  RPS14 Reverse Primer
ttctcatccactcctccacc

SEQ ID NO: 4021 - DNA, 20 bp, Artificial Sequence
  RPS14 Reverse Primer
aggaatggaggccaaaagat

SEQ ID NO: 4022 - DNA, 26 bp, Artificial Sequence
  RPS14 Reverse Primer
aaaaacagaaagaaagaaagaacaaa

SEQ ID NO: 4023 - DNA, 20 bp, Artificial Sequence
  RPS14 Reverse Primer
gtacctaggggccataagcc

SEQ ID NO: 4024 - DNA, 20 bp, Artificial Sequence
  RPS14 Reverse Primer
cctcctggcagaccttgata

SEQ ID NO: 4025 - DNA, 20 bp, Artificial Sequence
  RPS14 Reverse Primer
cccacttaagtagcgcttgg

SEQ ID NO: 4026 - DNA, 21 bp, Artificial Sequence
  RPS14 Reverse Primer
gatgtggttcctgtcctcaaa

SEQ ID NO: 4027 - DNA, 20 bp, Artificial Sequence
  RPS14 Reverse Primer
acagcaccaggcacattgta

SEQ ID NO: 4028 - DNA, 20 bp, Artificial Sequence
  RPS14 Reverse Primer
acatttctaaccacgccctg

SEQ ID NO: 4029 - DNA, 20 bp, Artificial Sequence
  RPS14 Reverse Primer
caacaggccagtcaggtcag

SEQ ID NO: 4030 - DNA, 20 bp, Artificial Sequence
  RPS14 Reverse Primer
acattcccagcacaaggaac

SEQ ID NO: 4031 - DNA, 20 bp, Artificial Sequence
  RPS14 Reverse Primer
ttggtgagggtaaccagcat

SEQ ID NO: 4032 - DNA, 20 bp, Artificial Sequence
  RPS14 Reverse Primer
tgggacagactcctgtttcc

SEQ ID NO: 4033 - DNA, 20 bp, Artificial Sequence
  RPS14 Reverse Primer
cctctctcctggcacaaaac

SEQ ID NO: 4034 - DNA, 18 bp, Artificial Sequence
  RPS14 Reverse Primer
ctccaggctcttccaccc

SEQ ID NO: 4035 - DNA, 20 bp, Artificial Sequence
  RPS14 Reverse Primer
gctgcctttgacccctatct

SEQ ID NO: 4036 - DNA, 19 bp, Artificial Sequence
  RPS14 Reverse Primer
ccgtctccccttacctcct

SEQ ID NO: 4037 - DNA, 19 bp, Artificial Sequence
  RPS14 Reverse Primer
ccccctaccctttgtcctc

SEQ ID NO: 4038 - DNA, 20 bp, Artificial Sequence
  RPS14 Reverse Primer
ttaaagagctgcgtgcaaag

SEQ ID NO: 4039 - DNA, 20 bp, Artificial Sequence
  RPS14 Reverse Primer
aacccactcaaggtcacacc

SEQ ID NO: 4040 - DNA, 20 bp, Artificial Sequence
  RPS14 Reverse Primer
gaagagagcattacctgccg

SEQ ID NO: 4041 - DNA, 20 bp, Artificial Sequence
  RPS14 Reverse Primer
aacacccttgccctacctct

SEQ ID NO: 4042 - DNA, 20 bp, Artificial Sequence
  RPS14 Reverse Primer
ataagatgtcacccccacca

SEQ ID NO: 4043 - DNA, 20 bp, Artificial Sequence
  RPS14 Reverse Primer
ctcaatgtccagcaaagcaa

SEQ ID NO: 4044 - DNA, 21 bp, Artificial Sequence
  RPS14 Reverse Primer
gaccacatcctcaacttgtga

SEQ ID NO: 4045 - DNA, 20 bp, Artificial Sequence
  RPS14 Reverse Primer
ccaagtcctccaaacagtcc

SEQ ID NO: 4046 - DNA, 20 bp, Artificial Sequence
  RPS14 Reverse Primer
aggaggccttgctgacatta

SEQ ID NO: 4047 - DNA, 20 bp, Artificial Sequence
  RPS14 Reverse Primer
cagcagcagctactttgcag

SEQ ID NO: 4048 - DNA, 21 bp, Artificial Sequence
  RPS14 Reverse Primer
aagggttattccccaaacctt

SEQ ID NO: 4049 - DNA, 24 bp, Artificial Sequence
  Chr5q_1 Forward Primer
tgaagaaacaaaacagatcaaaaa

SEQ ID NO: 4050 - DNA, 20 bp, Artificial Sequence
  Chr5q_1 Forward Primer
cctgttgcctcacatttcct

SEQ ID NO: 4051 - DNA, 20 bp, Artificial Sequence
  Chr5q_1 Forward Primer
ttgctgatgacaagttggct

SEQ ID NO: 4052 - DNA, 22 bp, Artificial Sequence
  Chr5q_1 Forward Primer
ttcagattttccatctccttga

SEQ ID NO: 4053 - DNA, 20 bp, Artificial Sequence
  Chr5q_1 Forward Primer
ctcttgtttcatgggggcta

SEQ ID NO: 4054 - DNA, 20 bp, Artificial Sequence
  Chr5q_1 Forward Primer
gacagcctggcatgaatttt

SEQ ID NO: 4055 - DNA, 24 bp, Artificial Sequence
  Chr5q_1 Forward Primer
ttaggatagccatcatttcaaaca

SEQ ID NO: 4056 - DNA, 20 bp, Artificial Sequence
  Chr5q_1 Forward Primer
gggcactggtgaatcagttt

SEQ ID NO: 4057 - DNA, 22 bp, Artificial Sequence
  Chr5q_1 Forward Primer
tgcacagaagtgctatgacaaa

SEQ ID NO: 4058 - DNA, 20 bp, Artificial Sequence
  Chr5q_1 Forward Primer
gtacaaatccctgggcaaga

SEQ ID NO: 4059 - DNA, 20 bp, Artificial Sequence
  Chr5q_1 Forward Primer
ccccagaactcaaacagcat

SEQ ID NO: 4060 - DNA, 20 bp, Artificial Sequence
  Chr5q_1 Forward Primer
ctttggagacggcagctaac

SEQ ID NO: 4061 - DNA, 23 bp, Artificial Sequence
  Chr5q_1 Forward Primer
aaaatatttgtgggagattgtca

SEQ ID NO: 4062 - DNA, 20 bp, Artificial Sequence
  Chr5q_1 Forward Primer
ggccagcacaatagttaccc

SEQ ID NO: 4063 - DNA, 22 bp, Artificial Sequence
  Chr5q_1 Forward Primer
ttcttcccaagcaaagtaatca

SEQ ID NO: 4064 - DNA, 22 bp, Artificial Sequence
  Chr5q_1 Forward Primer
tggtaaaaggtaaattggggaa

SEQ ID NO: 4065 - DNA, 20 bp, Artificial Sequence
  Chr5q_1 Forward Primer
agccctgttcctgaaggttt

SEQ ID NO: 4066 - DNA, 20 bp, Artificial Sequence
  Chr5q_1 Forward Primer
ctccctggaattctcttccc

SEQ ID NO: 4067 - DNA, 20 bp, Artificial Sequence
  Chr5q_1 Forward Primer
ggtgcccaccttctttcata

SEQ ID NO: 4068 - DNA, 20 bp, Artificial Sequence
  Chr5q_1 Forward Primer
cgtaggaccatcaaccgagt

SEQ ID NO: 4069 - DNA, 20 bp, Artificial Sequence
  Chr5q_1 Forward Primer
cttggttgtgcttcccactt

SEQ ID NO: 4070 - DNA, 20 bp, Artificial Sequence
  Chr5q_1 Forward Primer
tcacatggcaacctaggaaa

SEQ ID NO: 4071 - DNA, 20 bp, Artificial Sequence
  Chr5q_1 Forward Primer
gactatggtgggaggagtgc

SEQ ID NO: 4072 - DNA, 21 bp, Artificial Sequence
  Chr5q_1 Forward Primer
tggaacttttccattttggtg

SEQ ID NO: 4073 - DNA, 20 bp, Artificial Sequence
  Chr5q_1 Forward Primer
ctagcagcaatgacccatca

SEQ ID NO: 4074 - DNA, 20 bp, Artificial Sequence
  Chr5q_1 Forward Primer
ggggaggtcacgatgaataa

SEQ ID NO: 4075 - DNA, 20 bp, Artificial Sequence
  Chr5q_1 Forward Primer
gctgtttagtgcttcctggg

SEQ ID NO: 4076 - DNA, 20 bp, Artificial Sequence
  Chr5q_1 Forward Primer
tttaggaggctgcaagaagg

SEQ ID NO: 4077 - DNA, 20 bp, Artificial Sequence
  Chr5q_1 Forward Primer
gggatgctggtggtgttatt

SEQ ID NO: 4078 - DNA, 20 bp, Artificial Sequence
  Chr5q_1 Forward Primer
tcagcaatgcaatgcaacat

SEQ ID NO: 4079 - DNA, 23 bp, Artificial Sequence
  Chr5q_1 Forward Primer
tcactttcagcattgaaaatcat

SEQ ID NO: 4080 - DNA, 20 bp, Artificial Sequence
  Chr5q_1 Forward Primer
gagcccaaatggattttcaa

SEQ ID NO: 4081 - DNA, 20 bp, Artificial Sequence
  Chr5q_1 Forward Primer
atctggctagcagcaaggaa

SEQ ID NO: 4082 - DNA, 20 bp, Artificial Sequence
  Chr5q_1 Forward Primer
ctggcaaatagggtccacat

SEQ ID NO: 4083 - DNA, 24 bp, Artificial Sequence
  Chr5q_1 Forward Primer
attccatttcacttcaatgttttg

SEQ ID NO: 4084 - DNA, 20 bp, Artificial Sequence
  Chr5q_1 Forward Primer
tcctgcaagtcgtttgtttg

SEQ ID NO: 4085 - DNA, 20 bp, Artificial Sequence
  Chr5q_1 Forward Primer
gagggtgtggacttgttgct

SEQ ID NO: 4086 - DNA, 20 bp, Artificial Sequence
  Chr5q_1 Forward Primer
gcttaccaaacccatttcca

SEQ ID NO: 4087 - DNA, 20 bp, Artificial Sequence
  Chr5q_1 Forward Primer
gcctgtcagtgttttcccat

SEQ ID NO: 4088 - DNA, 20 bp, Artificial Sequence
  Chr5q_1 Forward Primer
tgactgtttgccaagattgc

SEQ ID NO: 4089 - DNA, 20 bp, Artificial Sequence
  Chr5q_1 Forward Primer
aattcatgccctgcttcaac

SEQ ID NO: 4090 - DNA, 20 bp, Artificial Sequence
  Chr5q_1 Forward Primer
ggaagaggacacttcctccc

SEQ ID NO: 4091 - DNA, 20 bp, Artificial Sequence
  Chr5q_1 Forward Primer
tctccttttcggagagtcca

SEQ ID NO: 4092 - DNA, 20 bp, Artificial Sequence
  Chr5q_1 Forward Primer
aaagtgtcccacttggcatt

SEQ ID NO: 4093 - DNA, 20 bp, Artificial Sequence
  Chr5q_1 Forward Primer
gcgctctgtggtaagcttct

SEQ ID NO: 4094 - DNA, 20 bp, Artificial Sequence
  Chr5q_1 Forward Primer
atgtggccaaaaacacaagc

SEQ ID NO: 4095 - DNA, 21 bp, Artificial Sequence
  Chr5q_1 Forward Primer
cctcaattccaaattcaacca

SEQ ID NO: 4096 - DNA, 20 bp, Artificial Sequence
  Chr5q_1 Forward Primer
aaaattttggctgagcaagc

SEQ ID NO: 4097 - DNA, 23 bp, Artificial Sequence
  Chr5q_1 Forward Primer
ttggaaattttggtcaattgttt

SEQ ID NO: 4098 - DNA, 26 bp, Artificial Sequence
  Chr5q_1 Forward Primer
tattctttgagttttattggaaggct

SEQ ID NO: 4099 - DNA, 23 bp, Artificial Sequence
  Chr5q_1 Forward Primer
cacatgacattgtctcctgaaaa

SEQ ID NO: 4100 - DNA, 20 bp, Artificial Sequence
  Chr5q_1 Forward Primer
cacattcaattcaccctccc

SEQ ID NO: 4101 - DNA, 20 bp, Artificial Sequence
  Chr5q_1 Forward Primer
cctttctctaaagccaagcc

SEQ ID NO: 4102 - DNA, 20 bp, Artificial Sequence
  Chr5q_1 Forward Primer
gtgaaaacccccataaagcc

SEQ ID NO: 4103 - DNA, 20 bp, Artificial Sequence
  Chr5q_1 Forward Primer
ccaagaccttgcccctaaat

SEQ ID NO: 4104 - DNA, 20 bp, Artificial Sequence
  Chr5q_1 Forward Primer
tcactctctggtccaaaccc

SEQ ID NO: 4105 - DNA, 20 bp, Artificial Sequence
  Chr5q_1 Forward Primer
actggacaggaagatgccac

SEQ ID NO: 4106 - DNA, 20 bp, Artificial Sequence
  Chr5q_1 Forward Primer
tggctagggtaatcatgagc

SEQ ID NO: 4107 - DNA, 20 bp, Artificial Sequence
  Chr5q_1 Forward Primer
tgtgtaaagccactctgcca

SEQ ID NO: 4108 - DNA, 20 bp, Artificial Sequence
  Chr5q_1 Forward Primer
ccatattggttgtgtttgcc

SEQ ID NO: 4109 - DNA, 20 bp, Artificial Sequence
  Chr5q_1 Forward Primer
gaatacatttggcccagtcc

SEQ ID NO: 4110 - DNA, 26 bp, Artificial Sequence
  Chr5q_1 Forward Primer
tttttccagacacttaaaattctgat

SEQ ID NO: 4111 - DNA, 21 bp, Artificial Sequence
  Chr5q_1 Forward Primer
tcaccatttttcagggttgtc

SEQ ID NO: 4112 - DNA, 24 bp, Artificial Sequence
  Chr5q_1 Forward Primer
gccatcattctaaaaattcaaaaa

SEQ ID NO: 4113 - DNA, 20 bp, Artificial Sequence
  Chr5q_1 Forward Primer
tggtgatgaggtcagctttg

SEQ ID NO: 4114 - DNA, 20 bp, Artificial Sequence
  Chr5q_1 Forward Primer
cctggttacagaccaatcca

SEQ ID NO: 4115 - DNA, 20 bp, Artificial Sequence
  Chr5q_1 Forward Primer
agaggatgtggcaggaatgt

SEQ ID NO: 4116 - DNA, 20 bp, Artificial Sequence
  Chr5q_1 Forward Primer
tcactgccctcgcttactct

SEQ ID NO: 4117 - DNA, 22 bp, Artificial Sequence
  Chr5q_1 Forward Primer
ttctctcttctcaaatccacca

SEQ ID NO: 4118 - DNA, 20 bp, Artificial Sequence
  Chr5q_1 Forward Primer
tctgctctacgtggcaaaaa

SEQ ID NO: 4119 - DNA, 20 bp, Artificial Sequence
  Chr5q_1 Forward Primer
caccatgccctatcctgatt

SEQ ID NO: 4120 - DNA, 20 bp, Artificial Sequence
  Chr5q_1 Forward Primer
tcatgtcaaaagttggcagc

SEQ ID NO: 4121 - DNA, 20 bp, Artificial Sequence
  Chr5q_1 Forward Primer
atggaccacctgtgtggttt

SEQ ID NO: 4122 - DNA, 22 bp, Artificial Sequence
  Chr5q_1 Forward Primer
gcaccaacaatttttaaggtcc

SEQ ID NO: 4123 - DNA, 20 bp, Artificial Sequence
  Chr5q_1 Forward Primer
cccagctgtgtcacttagca

SEQ ID NO: 4124 - DNA, 20 bp, Artificial Sequence
  Chr5q_1 Forward Primer
caaaagccaggcaataagga

SEQ ID NO: 4125 - DNA, 23 bp, Artificial Sequence
  Chr5q_1 Forward Primer
aacacaatcatcaaagtcattgc

SEQ ID NO: 4126 - DNA, 20 bp, Artificial Sequence
  Chr5q_1 Forward Primer
gattcaagcaggccacctaa

SEQ ID NO: 4127 - DNA, 20 bp, Artificial Sequence
  Chr5q_1 Forward Primer
cccacaattgcaggaaagaa

SEQ ID NO: 4128 - DNA, 20 bp, Artificial Sequence
  Chr5q_1 Forward Primer
tgctagctaaggcaagctcc

SEQ ID NO: 4129 - DNA, 20 bp, Artificial Sequence
  Chr5q_1 Forward Primer
caaactggaatcctgccaat

SEQ ID NO: 4130 - DNA, 21 bp, Artificial Sequence
  Chr5q_1 Forward Primer
ttgtttttccttgcaatgtcc

SEQ ID NO: 4131 - DNA, 20 bp, Artificial Sequence
  Chr5q_1 Forward Primer
tgagtcctgggtacttgcct

SEQ ID NO: 4132 - DNA, 23 bp, Artificial Sequence
  Chr5q_1 Forward Primer
catatgcaagccctttttatgtt

SEQ ID NO: 4133 - DNA, 20 bp, Artificial Sequence
  Chr5q_1 Forward Primer
gggcgttcatttccctaact

SEQ ID NO: 4134 - DNA, 20 bp, Artificial Sequence
  Chr5q_1 Forward Primer
ggggctataaaatcactgcg

SEQ ID NO: 4135 - DNA, 20 bp, Artificial Sequence
  Chr5q_1 Forward Primer
agcctggttttccctatgtg

SEQ ID NO: 4136 - DNA, 20 bp, Artificial Sequence
  Chr5q_1 Forward Primer
atgtgacagggttgcatttg

SEQ ID NO: 4137 - DNA, 20 bp, Artificial Sequence
  Chr5q_1 Forward Primer
tttaaacgttgagcttcggg

SEQ ID NO: 4138 - DNA, 27 bp, Artificial Sequence
  Chr5q_1 Forward Primer
tttcatagaaaataattgatgcacttc

SEQ ID NO: 4139 - DNA, 23 bp, Artificial Sequence
  Chr5q_1 Forward Primer
cagaatcgcctctagtaaacgaa

SEQ ID NO: 4140 - DNA, 21 bp, Artificial Sequence
  Chr5q_1 Forward Primer
gattgatatatgagcggtggc

SEQ ID NO: 4141 - DNA, 23 bp, Artificial Sequence
  Chr5q_1 Forward Primer
ttgtgattaaggtgatccaaaaa

SEQ ID NO: 4142 - DNA, 20 bp, Artificial Sequence
  Chr5q_1 Forward Primer
acccagaaagagagaaggca

SEQ ID NO: 4143 - DNA, 20 bp, Artificial Sequence
  Chr5q_1 Forward Primer
aggaagagagggagcacaca

SEQ ID NO: 4144 - DNA, 20 bp, Artificial Sequence
  Chr5q_1 Forward Primer
aagtgcattcccttgttgat

SEQ ID NO: 4145 - DNA, 20 bp, Artificial Sequence
  Chr5q_1 Reverse Primer
catgattggcattcagagga

SEQ ID NO: 4146 - DNA, 22 bp, Artificial Sequence
  Chr5q_1 Reverse Primer
gctttcaaacattatgggaaca

SEQ ID NO: 4147 - DNA, 22 bp, Artificial Sequence
  Chr5q_1 Reverse Primer
tcaaggggtttatggctaagaa

SEQ ID NO: 4148 - DNA, 23 bp, Artificial Sequence
  Chr5q_1 Reverse Primer
acataagccattaggattgagaa

SEQ ID NO: 4149 - DNA, 20 bp, Artificial Sequence
  Chr5q_1 Reverse Primer
atttggaggaatctccctgg

SEQ ID NO: 4150 - DNA, 20 bp, Artificial Sequence
  Chr5q_1 Reverse Primer
agccatctcagttctggtcc

SEQ ID NO: 4151 - DNA, 20 bp, Artificial Sequence
  Chr5q_1 Reverse Primer
ttattcaaagggttttgggg

SEQ ID NO: 4152 - DNA, 24 bp, Artificial Sequence
  Chr5q_1 Reverse Primer
ttttccatttttagaaccatgaca

SEQ ID NO: 4153 - DNA, 21 bp, Artificial Sequence
  Chr5q_1 Reverse Primer
tgatgtttggctatgacagga

SEQ ID NO: 4154 - DNA, 22 bp, Artificial Sequence
  Chr5q_1 Reverse Primer
tttccttcctctgtgtgtgtct

SEQ ID NO: 4155 - DNA, 20 bp, Artificial Sequence
  Chr5q_1 Reverse Primer
aacaagagtgacctgtgccc

SEQ ID NO: 4156 - DNA, 20 bp, Artificial Sequence
  Chr5q_1 Reverse Primer
tccagcggtgtcagacagta

SEQ ID NO: 4157 - DNA, 20 bp, Artificial Sequence
  Chr5q_1 Reverse Primer
taactttccccaacctgtgc

SEQ ID NO: 4158 - DNA, 21 bp, Artificial Sequence
  Chr5q_1 Reverse Primer
tcagggagggtagactgagaa

SEQ ID NO: 4159 - DNA, 20 bp, Artificial Sequence
  Chr5q_1 Reverse Primer
ttccaaacccagttcacctc

SEQ ID NO: 4160 - DNA, 20 bp, Artificial Sequence
  Chr5q_1 Reverse Primer
ttctatggctctcatgctgc

SEQ ID NO: 4161 - DNA, 21 bp, Artificial Sequence
  Chr5q_1 Reverse Primer
tcccaggtatggaatttgaga

SEQ ID NO: 4162 - DNA, 20 bp, Artificial Sequence
  Chr5q_1 Reverse Primer
acacagggctgtatggagga

SEQ ID NO: 4163 - DNA, 20 bp, Artificial Sequence
  Chr5q_1 Reverse Primer
atctgtggtggtggtgttga

SEQ ID NO: 4164 - DNA, 21 bp, Artificial Sequence
  Chr5q_1 Reverse Primer
catttctgaaacaggcaaagg

SEQ ID NO: 4165 - DNA, 20 bp, Artificial Sequence
  Chr5q_1 Reverse Primer
agatttcagggagactgggg

SEQ ID NO: 4166 - DNA, 21 bp, Artificial Sequence
  Chr5q_1 Reverse Primer
gcccataacatgaatacagcc

SEQ ID NO: 4167 - DNA, 20 bp, Artificial Sequence
  Chr5q_1 Reverse Primer
gctgcaaaaccacaggtgta

SEQ ID NO: 4168 - DNA, 20 bp, Artificial Sequence
  Chr5q_1 Reverse Primer
aggaccttcaggtcagtgga

SEQ ID NO: 4169 - DNA, 20 bp, Artificial Sequence
  Chr5q_1 Reverse Primer
cagaaaggccagagaaagga

SEQ ID NO: 4170 - DNA, 20 bp, Artificial Sequence
  Chr5q_1 Reverse Primer
gtgaccatgaagcagcagaa

SEQ ID NO: 4171 - DNA, 20 bp, Artificial Sequence
  Chr5q_1 Reverse Primer
ccttgctgttcccacagaat

SEQ ID NO: 4172 - DNA, 20 bp, Artificial Sequence
  Chr5q_1 Reverse Primer
gccatgaggcatatccaaac

SEQ ID NO: 4173 - DNA, 20 bp, Artificial Sequence
  Chr5q_1 Reverse Primer
cacatgacatctttgccctg

SEQ ID NO: 4174 - DNA, 26 bp, Artificial Sequence
  Chr5q_1 Reverse Primer
gaatattctagttccaggacattttt

SEQ ID NO: 4175 - DNA, 21 bp, Artificial Sequence
  Chr5q_1 Reverse Primer
ttactggcactgtgttggaga

SEQ ID NO: 4176 - DNA, 20 bp, Artificial Sequence
  Chr5q_1 Reverse Primer
cagggacgtctcttagcctg

SEQ ID NO: 4177 - DNA, 20 bp, Artificial Sequence
  Chr5q_1 Reverse Primer
tttattcatgcgatgcctgt

SEQ ID NO: 4178 - DNA, 20 bp, Artificial Sequence
  Chr5q_1 Reverse Primer
ttcctgtttaaaaatcgggc

SEQ ID NO: 4179 - DNA, 21 bp, Artificial Sequence
  Chr5q_1 Reverse Primer
ttgagcaaatttccttctcca

SEQ ID NO: 4180 - DNA, 20 bp, Artificial Sequence
  Chr5q_1 Reverse Primer
cctgacttccaactgccaat

SEQ ID NO: 4181 - DNA, 23 bp, Artificial Sequence
  Chr5q_1 Reverse Primer
ttgggtagctattgtagaaatcg

SEQ ID NO: 4182 - DNA, 20 bp, Artificial Sequence
  Chr5q_1 Reverse Primer
tctttcattgtgccatcctg

SEQ ID NO: 4183 - DNA, 20 bp, Artificial Sequence
  Chr5q_1 Reverse Primer
caccctgtgtgtagctggtg

SEQ ID NO: 4184 - DNA, 20 bp, Artificial Sequence
  Chr5q_1 Reverse Primer
atttgcttcagcacccaagt

SEQ ID NO: 4185 - DNA, 20 bp, Artificial Sequence
  Chr5q_1 Reverse Primer
gaactcagaggtgggcagag

SEQ ID NO: 4186 - DNA, 20 bp, Artificial Sequence
  Chr5q_1 Reverse Primer
ccacaggaagcacaagtgaa

SEQ ID NO: 4187 - DNA, 20 bp, Artificial Sequence
  Chr5q_1 Reverse Primer
ccccaagtcagaggaacagt

SEQ ID NO: 4188 - DNA, 20 bp, Artificial Sequence
  Chr5q_1 Reverse Primer
gctcatcaccctttacagcc

SEQ ID NO: 4189 - DNA, 20 bp, Artificial Sequence
  Chr5q_1 Reverse Primer
tccaggacacatgaagttgc

SEQ ID NO: 4190 - DNA, 20 bp, Artificial Sequence
  Chr5q_1 Reverse Primer
ctgccaggtagcagcaatgt

SEQ ID NO: 4191 - DNA, 20 bp, Artificial Sequence
  Chr5q_1 Reverse Primer
ttgcaagtgaaagccatgtt

SEQ ID NO: 4192 - DNA, 20 bp, Artificial Sequence
  Chr5q_1 Reverse Primer
aggtaactgaaaggccgagc

SEQ ID NO: 4193 - DNA, 21 bp, Artificial Sequence
  Chr5q_1 Reverse Primer
tgtgctatttcttctttccca

SEQ ID NO: 4194 - DNA, 27 bp, Artificial Sequence
  Chr5q_1 Reverse Primer
ttttaaaatattcttgtttccaatagc

SEQ ID NO: 4195 - DNA, 21 bp, Artificial Sequence
  Chr5q_1 Reverse Primer
gggaatcacttgggtttatgg

SEQ ID NO: 4196 - DNA, 20 bp, Artificial Sequence
  Chr5q_1 Reverse Primer
aggcatgatatatgggcacc

SEQ ID NO: 4197 - DNA, 20 bp, Artificial Sequence
  Chr5q_1 Reverse Primer
gatgaaggcagaggttgagg

SEQ ID NO: 4198 - DNA, 20 bp, Artificial Sequence
  Chr5q_1 Reverse Primer
ccccagaatgtagaggtcca

SEQ ID NO: 4199 - DNA, 20 bp, Artificial Sequence
  Chr5q_1 Reverse Primer
ggcttctgacttgagcgttt

SEQ ID NO: 4200 - DNA, 23 bp, Artificial Sequence
  Chr5q_1 Reverse Primer
ggagtagcagtggtgaacaattt

SEQ ID NO: 4201 - DNA, 20 bp, Artificial Sequence
  Chr5q_1 Reverse Primer
tacgtgagtgaccatgcacc

SEQ ID NO: 4202 - DNA, 20 bp, Artificial Sequence
  Chr5q_1 Reverse Primer
acttctctgccattctcgga

SEQ ID NO: 4203 - DNA, 20 bp, Artificial Sequence
  Chr5q_1 Reverse Primer
ctggtaaggatgcatgggac

SEQ ID NO: 4204 - DNA, 22 bp, Artificial Sequence
  Chr5q_1 Reverse Primer
catgcaaaaattcacaatttca

SEQ ID NO: 4205 - DNA, 20 bp, Artificial Sequence
  Chr5q_1 Reverse Primer
tccccatccaattggttaaa

SEQ ID NO: 4206 - DNA, 27 bp, Artificial Sequence
  Chr5q_1 Reverse Primer
aaaagcatgtaagaaattcatgtaaaa

SEQ ID NO: 4207 - DNA, 23 bp, Artificial Sequence
  Chr5q_1 Reverse Primer
tgtcaatagattgctggataggt

SEQ ID NO: 4208 - DNA, 21 bp, Artificial Sequence
  Chr5q_1 Reverse Primer
aggtgtgaggcattagaagca

SEQ ID NO: 4209 - DNA, 20 bp, Artificial Sequence
  Chr5q_1 Reverse Primer
gaaaggacgcagatcaggac

SEQ ID NO: 4210 - DNA, 21 bp, Artificial Sequence
  Chr5q_1 Reverse Primer
ggaaacaacacaattcatggg

SEQ ID NO: 4211 - DNA, 20 bp, Artificial Sequence
  Chr5q_1 Reverse Primer
gaccactgtctcaaccgtga

SEQ ID NO: 4212 - DNA, 20 bp, Artificial Sequence
  Chr5q_1 Reverse Primer
agaaggtatgaaggtggggg

SEQ ID NO: 4213 - DNA, 21 bp, Artificial Sequence
  Chr5q_1 Reverse Primer
caacaaccattcccctaaaga

SEQ ID NO: 4214 - DNA, 22 bp, Artificial Sequence
  Chr5q_1 Reverse Primer
tgtgctgtacattgtgctcatc

SEQ ID NO: 4215 - DNA, 23 bp, Artificial Sequence
  Chr5q_1 Reverse Primer
ggtcacctcctaagttcttcaca

SEQ ID NO: 4216 - DNA, 21 bp, Artificial Sequence
  Chr5q_1 Reverse Primer
tgtgttctctccattatgcca

SEQ ID NO: 4217 - DNA, 20 bp, Artificial Sequence
  Chr5q_1 Reverse Primer
ctttgttttgagcgttgctg

SEQ ID NO: 4218 - DNA, 26 bp, Artificial Sequence
  Chr5q_1 Reverse Primer
tgtcctgtctctcaagaactttctac

SEQ ID NO: 4219 - DNA, 20 bp, Artificial Sequence
  Chr5q_1 Reverse Primer
tgggcagtagcaagacagaa

SEQ ID NO: 4220 - DNA, 20 bp, Artificial Sequence
  Chr5q_1 Reverse Primer
ggatacttggccaccttgaa

SEQ ID NO: 4221 - DNA, 20 bp, Artificial Sequence
  Chr5q_1 Reverse Primer
tgagcatgggttcacatagg

SEQ ID NO: 4222 - DNA, 20 bp, Artificial Sequence
  Chr5q_1 Reverse Primer
ttgatggctgtttcccaaat

SEQ ID NO: 4223 - DNA, 22 bp, Artificial Sequence
  Chr5q_1 Reverse Primer
ggttagtgcccaatctctagca

SEQ ID NO: 4224 - DNA, 20 bp, Artificial Sequence
  Chr5q_1 Reverse Primer
tagtgtgttccagcacagcc

SEQ ID NO: 4225 - DNA, 20 bp, Artificial Sequence
  Chr5q_1 Reverse Primer
aagatcccaggagaatgcaa

SEQ ID NO: 4226 - DNA, 21 bp, Artificial Sequence
  Chr5q_1 Reverse Primer
gactccctcagttaaggtccc

SEQ ID NO: 4227 - DNA, 21 bp, Artificial Sequence
  Chr5q_1 Reverse Primer
aaggatttgcatatgctccaa

SEQ ID NO: 4228 - DNA, 23 bp, Artificial Sequence
  Chr5q_1 Reverse Primer
gggggagataggaacttattttg

SEQ ID NO: 4229 - DNA, 20 bp, Artificial Sequence
  Chr5q_1 Reverse Primer
gggagaaagccctcttccta

SEQ ID NO: 4230 - DNA, 20 bp, Artificial Sequence
  Chr5q_1 Reverse Primer
gggcagccaataaaacacaa

SEQ ID NO: 4231 - DNA, 20 bp, Artificial Sequence
  Chr5q_1 Reverse Primer
tggtgaccagcactaatgac

SEQ ID NO: 4232 - DNA, 20 bp, Artificial Sequence
  Chr5q_1 Reverse Primer
caggcaggataatggagcat

SEQ ID NO: 4233 - DNA, 23 bp, Artificial Sequence
  Chr5q_1 Reverse Primer
tctaccaatcaaggagaacagtg

SEQ ID NO: 4234 - DNA, 25 bp, Artificial Sequence
  Chr5q_1 Reverse Primer
aagagaaaaagagaaatgctatgcc

SEQ ID NO: 4235 - DNA, 23 bp, Artificial Sequence
  Chr5q_1 Reverse Primer
tgtttggtgtgaccataatttca

SEQ ID NO: 4236 - DNA, 22 bp, Artificial Sequence
  Chr5q_1 Reverse Primer
ggaagatgactgatacaacccg

SEQ ID NO: 4237 - DNA, 27 bp, Artificial Sequence
  Chr5q_1 Reverse Primer
aatgttagaacataatgaagtacatgc

SEQ ID NO: 4238 - DNA, 21 bp, Artificial Sequence
  Chr5q_1 Reverse Primer
ggaattaggcagtgcttgtca

SEQ ID NO: 4239 - DNA, 20 bp, Artificial Sequence
  Chr5q_1 Reverse Primer
tcccggcaatgaaaataatc

SEQ ID NO: 4240 - DNA, 20 bp, Artificial Sequence
  Chr5q_1 Reverse Primer
cttgcttcctggcatatggt

SEQ ID NO: 4241 - DNA, 20 bp, Artificial Sequence
  Chr5q_2 Forward Primer
caccaagggaactggctatt

SEQ ID NO: 4242 - DNA, 19 bp, Artificial Sequence
  Chr5q_2 Forward Primer
cagctgactcacctcagcc

SEQ ID NO: 4243 - DNA, 22 bp, Artificial Sequence
  Chr5q_2 Forward Primer
cccaagaatttgaaaggaagaa

SEQ ID NO: 4244 - DNA, 20 bp, Artificial Sequence
  Chr5q_2 Forward Primer
gcaagagcttttcattgcct

SEQ ID NO: 4245 - DNA, 20 bp, Artificial Sequence
  Chr5q_2 Forward Primer
tggaaaagatgtcagtcccc

SEQ ID NO: 4246 - DNA, 21 bp, Artificial Sequence
  Chr5q_2 Forward Primer
tggtatttgacaagagtggca

SEQ ID NO: 4247 - DNA, 20 bp, Artificial Sequence
  Chr5q_2 Forward Primer
tgatatgggatgggccttta

SEQ ID NO: 4248 - DNA, 20 bp, Artificial Sequence
  Chr5q_2 Forward Primer
acatgaagggcagcagaact

SEQ ID NO: 4249 - DNA, 20 bp, Artificial Sequence
  Chr5q_2 Forward Primer
ggcacactgtctaaccccat

SEQ ID NO: 4250 - DNA, 20 bp, Artificial Sequence
  Chr5q_2 Forward Primer
ctgtcctgtctgctccaaca

SEQ ID NO: 4251 - DNA, 19 bp, Artificial Sequence
  Chr5q_2 Forward Primer
ccggcattcatctgtatcg

SEQ ID NO: 4252 - DNA, 21 bp, Artificial Sequence
  Chr5q_2 Forward Primer
tcaagcaatatgcaggaatca

SEQ ID NO: 4253 - DNA, 25 bp, Artificial Sequence
  Chr5q_2 Forward Primer
aagtcagcattacaaatccaattta

SEQ ID NO: 4254 - DNA, 20 bp, Artificial Sequence
  Chr5q_2 Forward Primer
gttgggtttgaaaggcaaat

SEQ ID NO: 4255 - DNA, 21 bp, Artificial Sequence
  Chr5q_2 Forward Primer
tgcttctaatgctcaaaaccc

SEQ ID NO: 4256 - DNA, 20 bp, Artificial Sequence
  Chr5q_2 Forward Primer
tcttgggacctctccaatca

SEQ ID NO: 4257 - DNA, 20 bp, Artificial Sequence
  Chr5q_2 Forward Primer
gcagcataaaacccaggaga

SEQ ID NO: 4258 - DNA, 20 bp, Artificial Sequence
  Chr5q_2 Forward Primer
ggaatggagattgcttcacc

SEQ ID NO: 4259 - DNA, 20 bp, Artificial Sequence
  Chr5q_2 Forward Primer
taggctaccttccaagcagg

SEQ ID NO: 4260 - DNA, 20 bp, Artificial Sequence
  Chr5q_2 Forward Primer
cattggaaattgcagtgtgg

SEQ ID NO: 4261 - DNA, 20 bp, Artificial Sequence
  Chr5q_2 Forward Primer
gcacatccttaaaccaggga

SEQ ID NO: 4262 - DNA, 20 bp, Artificial Sequence
  Chr5q_2 Forward Primer
atccagtgctaggatggtgg

SEQ ID NO: 4263 - DNA, 20 bp, Artificial Sequence
  Chr5q_2 Forward Primer
tggaaaccaggaccctaaga

SEQ ID NO: 4264 - DNA, 20 bp, Artificial Sequence
  Chr5q_2 Forward Primer
acctgctctgctcccagata

SEQ ID NO: 4265 - DNA, 21 bp, Artificial Sequence
  Chr5q_2 Forward Primer
cacacaagcttctgatcctca

SEQ ID NO: 4266 - DNA, 20 bp, Artificial Sequence
  Chr5q_2 Forward Primer
ccttctccagctgactgtcc

SEQ ID NO: 4267 - DNA, 20 bp, Artificial Sequence
  Chr5q_2 Forward Primer
aagaagctcaattgtccccc

SEQ ID NO: 4268 - DNA, 20 bp, Artificial Sequence
  Chr5q_2 Forward Primer
ttctttcatgagaggccacc

SEQ ID NO: 4269 - DNA, 20 bp, Artificial Sequence
  Chr5q_2 Forward Primer
aggcacacaacagcacactc

SEQ ID NO: 4270 - DNA, 20 bp, Artificial Sequence
  Chr5q_2 Forward Primer
gtaaggtctaggcggggaac

SEQ ID NO: 4271 - DNA, 20 bp, Artificial Sequence
  Chr5q_2 Forward Primer
agctaaaactccatggctcg

SEQ ID NO: 4272 - DNA, 20 bp, Artificial Sequence
  Chr5q_2 Forward Primer
tcagaacacagccacagtcc

SEQ ID NO: 4273 - DNA, 20 bp, Artificial Sequence
  Chr5q_2 Forward Primer
gctcaaagaaaagtgggcat

SEQ ID NO: 4274 - DNA, 20 bp, Artificial Sequence
  Chr5q_2 Forward Primer
agcatggctgtctcctgact

SEQ ID NO: 4275 - DNA, 20 bp, Artificial Sequence
  Chr5q_2 Forward Primer
cagggaactcacaaccatcc

SEQ ID NO: 4276 - DNA, 20 bp, Artificial Sequence
  Chr5q_2 Forward Primer
agatgcatggagatgcacaa

SEQ ID NO: 4277 - DNA, 20 bp, Artificial Sequence
  Chr5q_2 Forward Primer
tcacctcccacacactttga

SEQ ID NO: 4278 - DNA, 20 bp, Artificial Sequence
  Chr5q_2 Forward Primer
acatcctcgtcagccttgtc

SEQ ID NO: 4279 - DNA, 20 bp, Artificial Sequence
  Chr5q_2 Forward Primer
taggccatctgggctgttta

SEQ ID NO: 4280 - DNA, 20 bp, Artificial Sequence
  Chr5q_2 Forward Primer
agctactaagaggcggaccc

SEQ ID NO: 4281 - DNA, 20 bp, Artificial Sequence
  Chr5q_2 Forward Primer
ttggaaccaaatcacccaat

SEQ ID NO: 4282 - DNA, 20 bp, Artificial Sequence
  Chr5q_2 Forward Primer
gtcacatgcctgtcacgttt

SEQ ID NO: 4283 - DNA, 20 bp, Artificial Sequence
  Chr5q_2 Forward Primer
ttctttcctgcagaagccat

SEQ ID NO: 4284 - DNA, 20 bp, Artificial Sequence
  Chr5q_2 Forward Primer
accccaagtgagatcttcca

SEQ ID NO: 4285 - DNA, 20 bp, Artificial Sequence
  Chr5q_2 Forward Primer
gttttcctcgaagaagccct

SEQ ID NO: 4286 - DNA, 20 bp, Artificial Sequence
  Chr5q_2 Forward Primer
ccagggaagtaggagaaggg

SEQ ID NO: 4287 - DNA, 20 bp, Artificial Sequence
  Chr5q_2 Forward Primer
ccgaccgctctatctcactt

SEQ ID NO: 4288 - DNA, 20 bp, Artificial Sequence
  Chr5q_2 Forward Primer
tctgagtagcagcaacccct

SEQ ID NO: 4289 - DNA, 20 bp, Artificial Sequence
  Chr5q_2 Forward Primer
tggagtaagggtgcaaatga

SEQ ID NO: 4290 - DNA, 20 bp, Artificial Sequence
  Chr5q_2 Forward Primer
ggtcagttactttgggcagg

SEQ ID NO: 4291 - DNA, 20 bp, Artificial Sequence
  Chr5q_2 Forward Primer
actccctaaagcccatccat

SEQ ID NO: 4292 - DNA, 20 bp, Artificial Sequence
  Chr5q_2 Forward Primer
gatgatggaggaggcacagt

SEQ ID NO: 4293 - DNA, 20 bp, Artificial Sequence
  Chr5q_2 Forward Primer
gtttggccattttctgcaat

SEQ ID NO: 4294 - DNA, 20 bp, Artificial Sequence
  Chr5q_2 Forward Primer
gtcccagctattccccaaat

SEQ ID NO: 4295 - DNA, 20 bp, Artificial Sequence
  Chr5q_2 Forward Primer
cccttctggaggtgtttgaa

SEQ ID NO: 4296 - DNA, 24 bp, Artificial Sequence
  Chr5q_2 Forward Primer
cacactgtgagagtggatttatga

SEQ ID NO: 4297 - DNA, 20 bp, Artificial Sequence
  Chr5q_2 Forward Primer
tggtttggtaccctcctttg

SEQ ID NO: 4298 - DNA, 20 bp, Artificial Sequence
  Chr5q_2 Forward Primer
ccccaatcaagtgagagcag

SEQ ID NO: 4299 - DNA, 20 bp, Artificial Sequence
  Chr5q_2 Forward Primer
agcctatgccagtggttttg

SEQ ID NO: 4300 - DNA, 20 bp, Artificial Sequence
  Chr5q_2 Forward Primer
tgctatcaccaccaccatct

SEQ ID NO: 4301 - DNA, 20 bp, Artificial Sequence
  Chr5q_2 Forward Primer
agttcaagctgctctccacc

SEQ ID NO: 4302 - DNA, 21 bp, Artificial Sequence
  Chr5q_2 Forward Primer
ggtgcagaaaatggttaagga

SEQ ID NO: 4303 - DNA, 23 bp, Artificial Sequence
  Chr5q_2 Forward Primer
tccttaaaccaacttttgtgagg

SEQ ID NO: 4304 - DNA, 20 bp, Artificial Sequence
  Chr5q_2 Forward Primer
aaccttggcaacaatgaagg

SEQ ID NO: 4305 - DNA, 20 bp, Artificial Sequence
  Chr5q_2 Forward Primer
cgccttgatacacgacagag

SEQ ID NO: 4306 - DNA, 20 bp, Artificial Sequence
  Chr5q_2 Forward Primer
cctgacttctgacccagctc

SEQ ID NO: 4307 - DNA, 21 bp, Artificial Sequence
  Chr5q_2 Forward Primer
ttactgccatctatgggatgc

SEQ ID NO: 4308 - DNA, 21 bp, Artificial Sequence
  Chr5q_2 Forward Primer
tgaagaaggtcaaggaccaga

SEQ ID NO: 4309 - DNA, 21 bp, Artificial Sequence
  Chr5q_2 Forward Primer
tatcctaaaccctggggagag

SEQ ID NO: 4310 - DNA, 20 bp, Artificial Sequence
  Chr5q_2 Forward Primer
caagaaagcaagcaagcaag

SEQ ID NO: 4311 - DNA, 20 bp, Artificial Sequence
  Chr5q_2 Forward Primer
atggaccagatgttgccttt

SEQ ID NO: 4312 - DNA, 22 bp, Artificial Sequence
  Chr5q_2 Forward Primer
cccttttgtttctatcctggaa

SEQ ID NO: 4313 - DNA, 20 bp, Artificial Sequence
  Chr5q_2 Forward Primer
attctcacactgacggaggg

SEQ ID NO: 4314 - DNA, 20 bp, Artificial Sequence
  Chr5q_2 Forward Primer
tcaagtgtcaagcaactgcc

SEQ ID NO: 4315 - DNA, 20 bp, Artificial Sequence
  Chr5q_2 Forward Primer
ttgggtatgcaaggcatttt

SEQ ID NO: 4316 - DNA, 20 bp, Artificial Sequence
  Chr5q_2 Forward Primer
gtggtcagggaaggtgacat

SEQ ID NO: 4317 - DNA, 20 bp, Artificial Sequence
  Chr5q_2 Forward Primer
cctgtccacaactagcagca

SEQ ID NO: 4318 - DNA, 20 bp, Artificial Sequence
  Chr5q_2 Forward Primer
gcgctagttggtagtgggtc

SEQ ID NO: 4319 - DNA, 20 bp, Artificial Sequence
  Chr5q_2 Forward Primer
cagaagaagaaacggcagga

SEQ ID NO: 4320 - DNA, 20 bp, Artificial Sequence
  Chr5q_2 Forward Primer
catgcctatgggaagctgtt

SEQ ID NO: 4321 - DNA, 20 bp, Artificial Sequence
  Chr5q_2 Forward Primer
cttggctagcactcatcacg

SEQ ID NO: 4322 - DNA, 20 bp, Artificial Sequence
  Chr5q_2 Forward Primer
ccagacaggaggctggagta

SEQ ID NO: 4323 - DNA, 20 bp, Artificial Sequence
  Chr5q_2 Forward Primer
atttggttgtgcaaccttcc

SEQ ID NO: 4324 - DNA, 20 bp, Artificial Sequence
  Chr5q_2 Forward Primer
ggaggtccactcgaagatca

SEQ ID NO: 4325 - DNA, 20 bp, Artificial Sequence
  Chr5q_2 Forward Primer
ctagctccattccttgctgg

SEQ ID NO: 4326 - DNA, 20 bp, Artificial Sequence
  Chr5q_2 Forward Primer
ggagaaggcccatagtgtct

SEQ ID NO: 4327 - DNA, 20 bp, Artificial Sequence
  Chr5q_2 Forward Primer
atggcctaaaaaccccaaat

SEQ ID NO: 4328 - DNA, 20 bp, Artificial Sequence
  Chr5q_2 Forward Primer
ggaaaccagctgacgatgtt

SEQ ID NO: 4329 - DNA, 20 bp, Artificial Sequence
  Chr5q_2 Forward Primer
ggatggttttgtccatgtcc

SEQ ID NO: 4330 - DNA, 20 bp, Artificial Sequence
  Chr5q_2 Forward Primer
ccaggaaactgattcccaga

SEQ ID NO: 4331 - DNA, 20 bp, Artificial Sequence
  Chr5q_2 Forward Primer
tgctcttggttggaaaacct

SEQ ID NO: 4332 - DNA, 24 bp, Artificial Sequence
  Chr5q_2 Forward Primer
caaagtattcacacaaacaggaca

SEQ ID NO: 4333 - DNA, 20 bp, Artificial Sequence
  Chr5q_2 Forward Primer
ggtttcaccttctctgcctg

SEQ ID NO: 4334 - DNA, 20 bp, Artificial Sequence
  Chr5q_2 Forward Primer
gacctgggtttgggtttctt

SEQ ID NO: 4335 - DNA, 20 bp, Artificial Sequence
  Chr5q_2 Forward Primer
tatcctttgaggcaaccctg

SEQ ID NO: 4336 - DNA, 20 bp, Artificial Sequence
  Chr5q_2 Forward Primer
tgggattccagagtttctgc

SEQ ID NO: 4337 - DNA, 20 bp, Artificial Sequence
  Chr5q_2 Reverse Primer
agaatttgctgaaggcccta

SEQ ID NO: 4338 - DNA, 20 bp, Artificial Sequence
  Chr5q_2 Reverse Primer
tcaggtctcagacagttgcg

SEQ ID NO: 4339 - DNA, 20 bp, Artificial Sequence
  Chr5q_2 Reverse Primer
atgaatcaccacatggctca

SEQ ID NO: 4340 - DNA, 20 bp, Artificial Sequence
  Chr5q_2 Reverse Primer
atgaatgcttttggtttggg

SEQ ID NO: 4341 - DNA, 22 bp, Artificial Sequence
  Chr5q_2 Reverse Primer
ttctgcttatctctgcctgtga

SEQ ID NO: 4342 - DNA, 20 bp, Artificial Sequence
  Chr5q_2 Reverse Primer
tgcccattgcacactaaaaa

SEQ ID NO: 4343 - DNA, 20 bp, Artificial Sequence
  Chr5q_2 Reverse Primer
tcccctactggtccatcttg

SEQ ID NO: 4344 - DNA, 20 bp, Artificial Sequence
  Chr5q_2 Reverse Primer
tgggggtggtgaattatagg

SEQ ID NO: 4345 - DNA, 20 bp, Artificial Sequence
  Chr5q_2 Reverse Primer
tgaatttccccagtcggata

SEQ ID NO: 4346 - DNA, 20 bp, Artificial Sequence
  Chr5q_2 Reverse Primer
acaccattgctgaaaaggct

SEQ ID NO: 4347 - DNA, 20 bp, Artificial Sequence
  Chr5q_2 Reverse Primer
gcttggattcaactttgctg

SEQ ID NO: 4348 - DNA, 20 bp, Artificial Sequence
  Chr5q_2 Reverse Primer
ttttgggctgcatttttagc

SEQ ID NO: 4349 - DNA, 23 bp, Artificial Sequence
  Chr5q_2 Reverse Primer
agggagcctttgactaatttttg

SEQ ID NO: 4350 - DNA, 20 bp, Artificial Sequence
  Chr5q_2 Reverse Primer
gggacctctgaggggactat

SEQ ID NO: 4351 - DNA, 22 bp, Artificial Sequence
  Chr5q_2 Reverse Primer
aacactcttccaccacatctga

SEQ ID NO: 4352 - DNA, 20 bp, Artificial Sequence
  Chr5q_2 Reverse Primer
ttaagaacctccaagcccaa

SEQ ID NO: 4353 - DNA, 20 bp, Artificial Sequence
  Chr5q_2 Reverse Primer
gtttaggcccctgaggaaac

SEQ ID NO: 4354 - DNA, 21 bp, Artificial Sequence
  Chr5q_2 Reverse Primer
tcgtggtgagaatttgtctga

SEQ ID NO: 4355 - DNA, 20 bp, Artificial Sequence
  Chr5q_2 Reverse Primer
atcctgagcctagcatcgtg

SEQ ID NO: 4356 - DNA, 20 bp, Artificial Sequence
  Chr5q_2 Reverse Primer
ttcccctgcctcacatttag

SEQ ID NO: 4357 - DNA, 20 bp, Artificial Sequence
  Chr5q_2 Reverse Primer
cgctgtgttttcacatttgg

SEQ ID NO: 4358 - DNA, 20 bp, Artificial Sequence
  Chr5q_2 Reverse Primer
ccaagtgaacagcaaccaca

SEQ ID NO: 4359 - DNA, 20 bp, Artificial Sequence
  Chr5q_2 Reverse Primer
tggggagaaagttcctcaga

SEQ ID NO: 4360 - DNA, 21 bp, Artificial Sequence
  Chr5q_2 Reverse Primer
tttgtgactggtgttttccct

SEQ ID NO: 4361 - DNA, 20 bp, Artificial Sequence
  Chr5q_2 Reverse Primer
gggatcctctccatgaaggt

SEQ ID NO: 4362 - DNA, 20 bp, Artificial Sequence
  Chr5q_2 Reverse Primer
gggctacagtacaggcttgc

SEQ ID NO: 4363 - DNA, 20 bp, Artificial Sequence
  Chr5q_2 Reverse Primer
gaggcacgaaagaaaacagg

SEQ ID NO: 4364 - DNA, 20 bp, Artificial Sequence
  Chr5q_2 Reverse Primer
gggaaggagctgcatgtaaa

SEQ ID NO: 4365 - DNA, 20 bp, Artificial Sequence
  Chr5q_2 Reverse Primer
gccttaaggtgcctaccaca

SEQ ID NO: 4366 - DNA, 20 bp, Artificial Sequence
  Chr5q_2 Reverse Primer
tacaacacagaacccagcca

SEQ ID NO: 4367 - DNA, 20 bp, Artificial Sequence
  Chr5q_2 Reverse Primer
tccgacaacagagcagctta

SEQ ID NO: 4368 - DNA, 20 bp, Artificial Sequence
  Chr5q_2 Reverse Primer
tgcaacattctctgctttgc

SEQ ID NO: 4369 - DNA, 20 bp, Artificial Sequence
  Chr5q_2 Reverse Primer
gcacacgtgtcctcaagact

SEQ ID NO: 4370 - DNA, 20 bp, Artificial Sequence
  Chr5q_2 Reverse Primer
gcagggaacgatgacagatt

SEQ ID NO: 4371 - DNA, 18 bp, Artificial Sequence
  Chr5q_2 Reverse Primer
ctggccagcctgtcactc

SEQ ID NO: 4372 - DNA, 20 bp, Artificial Sequence
  Chr5q_2 Reverse Primer
gccttcaagaggctcagatg

SEQ ID NO: 4373 - DNA, 20 bp, Artificial Sequence
  Chr5q_2 Reverse Primer
gcattctagctcggaatcca

SEQ ID NO: 4374 - DNA, 20 bp, Artificial Sequence
  Chr5q_2 Reverse Primer
aatgagagtagggaaggccc

SEQ ID NO: 4375 - DNA, 21 bp, Artificial Sequence
  Chr5q_2 Reverse Primer
gatgattttcgtcccatttca

SEQ ID NO: 4376 - DNA, 20 bp, Artificial Sequence
  Chr5q_2 Reverse Primer
tagactgccagccttccaac

SEQ ID NO: 4377 - DNA, 20 bp, Artificial Sequence
  Chr5q_2 Reverse Primer
actcccagacaatcaggtgc

SEQ ID NO: 4378 - DNA, 23 bp, Artificial Sequence
  Chr5q_2 Reverse Primer
ttggtggtaattccttttcagtt

SEQ ID NO: 4379 - DNA, 20 bp, Artificial Sequence
  Chr5q_2 Reverse Primer
ttttcaaggagtcccattgc

SEQ ID NO: 4380 - DNA, 20 bp, Artificial Sequence
  Chr5q_2 Reverse Primer
gacagcctcagtgtctctgc

SEQ ID NO: 4381 - DNA, 20 bp, Artificial Sequence
  Chr5q_2 Reverse Primer
agaatgcattaccaggcagg

SEQ ID NO: 4382 - DNA, 20 bp, Artificial Sequence
  Chr5q_2 Reverse Primer
cttgcaagaggggttaccaa

SEQ ID NO: 4383 - DNA, 20 bp, Artificial Sequence
  Chr5q_2 Reverse Primer
aacgcttgaagctgcattct

SEQ ID NO: 4384 - DNA, 20 bp, Artificial Sequence
  Chr5q_2 Reverse Primer
ttactgtcccttggctgtcc

SEQ ID NO: 4385 - DNA, 20 bp, Artificial Sequence
  Chr5q_2 Reverse Primer
cctcttcccagctgtttctg

SEQ ID NO: 4386 - DNA, 20 bp, Artificial Sequence
  Chr5q_2 Reverse Primer
caagcagggtagcaacatga

SEQ ID NO: 4387 - DNA, 22 bp, Artificial Sequence
  Chr5q_2 Reverse Primer
cgcacactctctctctctcaaa

SEQ ID NO: 4388 - DNA, 20 bp, Artificial Sequence
  Chr5q_2 Reverse Primer
ctccctgccatcactttcat

SEQ ID NO: 4389 - DNA, 20 bp, Artificial Sequence
  Chr5q_2 Reverse Primer
gtgctccttgagggtgagac

SEQ ID NO: 4390 - DNA, 20 bp, Artificial Sequence
  Chr5q_2 Reverse Primer
catttccatgaaaaagggca

SEQ ID NO: 4391 - DNA, 20 bp, Artificial Sequence
  Chr5q_2 Reverse Primer
tcagccatggagatgttgag

SEQ ID NO: 4392 - DNA, 27 bp, Artificial Sequence
  Chr5q_2 Reverse Primer
tttacgtttcagatgagacaaactatt

SEQ ID NO: 4393 - DNA, 20 bp, Artificial Sequence
  Chr5q_2 Reverse Primer
gggcagataatttcaggtgc

SEQ ID NO: 4394 - DNA, 20 bp, Artificial Sequence
  Chr5q_2 Reverse Primer
ggtctttttgctgagccttg

SEQ ID NO: 4395 - DNA, 20 bp, Artificial Sequence
  Chr5q_2 Reverse Primer
ccccagatccttgtgtgttt

SEQ ID NO: 4396 - DNA, 21 bp, Artificial Sequence
  Chr5q_2 Reverse Primer
tgaaaatcagcattctcatgg

SEQ ID NO: 4397 - DNA, 20 bp, Artificial Sequence
  Chr5q_2 Reverse Primer
acaattgatgagagaccggg

SEQ ID NO: 4398 - DNA, 20 bp, Artificial Sequence
  Chr5q_2 Reverse Primer
ttctcctgggtttcctcaga

SEQ ID NO: 4399 - DNA, 20 bp, Artificial Sequence
  Chr5q_2 Reverse Primer
tgtttgagggaacgtaggct

SEQ ID NO: 4400 - DNA, 20 bp, Artificial Sequence
  Chr5q_2 Reverse Primer
ccctgcaaactcggtatcat

SEQ ID NO: 4401 - DNA, 20 bp, Artificial Sequence
  Chr5q_2 Reverse Primer
aaagaaaaggcaagcaaggc

SEQ ID NO: 4402 - DNA, 20 bp, Artificial Sequence
  Chr5q_2 Reverse Primer
aggctccttcagggaaagaa

SEQ ID NO: 4403 - DNA, 20 bp, Artificial Sequence
  Chr5q_2 Reverse Primer
caggaaaatttgctccctca

SEQ ID NO: 4404 - DNA, 20 bp, Artificial Sequence
  Chr5q_2 Reverse Primer
tgtctttcaaagcctctgcc

SEQ ID NO: 4405 - DNA, 22 bp, Artificial Sequence
  Chr5q_2 Reverse Primer
ctgtgcactatgtatcccttgg

SEQ ID NO: 4406 - DNA, 20 bp, Artificial Sequence
  Chr5q_2 Reverse Primer
ttccccacactgtcatcaat

SEQ ID NO: 4407 - DNA, 20 bp, Artificial Sequence
  Chr5q_2 Reverse Primer
cctaacagaggctactggcg

SEQ ID NO: 4408 - DNA, 21 bp, Artificial Sequence
  Chr5q_2 Reverse Primer
tcagcaaaccagagtaatgcc

SEQ ID NO: 4409 - DNA, 20 bp, Artificial Sequence
  Chr5q_2 Reverse Primer
tgatgccaggatttaggctc

SEQ ID NO: 4410 - DNA, 20 bp, Artificial Sequence
  Chr5q_2 Reverse Primer
tcctctgctccagtgtgttg

SEQ ID NO: 4411 - DNA, 20 bp, Artificial Sequence
  Chr5q_2 Reverse Primer
aaaccattcgtcttgttcgc

SEQ ID NO: 4412 - DNA, 20 bp, Artificial Sequence
  Chr5q_2 Reverse Primer
cttctccagcatcatcccat

SEQ ID NO: 4413 - DNA, 20 bp, Artificial Sequence
  Chr5q_2 Reverse Primer
agaggtgtgtgtgtaggggc

SEQ ID NO: 4414 - DNA, 20 bp, Artificial Sequence
  Chr5q_2 Reverse Primer
ctcccaattagctccccttc

SEQ ID NO: 4415 - DNA, 20 bp, Artificial Sequence
  Chr5q_2 Reverse Primer
ttggctctagcaccaactcc

SEQ ID NO: 4416 - DNA, 20 bp, Artificial Sequence
  Chr5q_2 Reverse Primer
ccctgggagtagaaagggag

SEQ ID NO: 4417 - DNA, 20 bp, Artificial Sequence
  Chr5q_2 Reverse Primer
aggaccacctgtcaattgct

SEQ ID NO: 4418 - DNA, 21 bp, Artificial Sequence
  Chr5q_2 Reverse Primer
caggatgaaaatatgcaaggc

SEQ ID NO: 4419 - DNA, 20 bp, Artificial Sequence
  Chr5q_2 Reverse Primer
gtgttccccagggtcctact

SEQ ID NO: 4420 - DNA, 20 bp, Artificial Sequence
  Chr5q_2 Reverse Primer
caccaaagtccatgttccct

SEQ ID NO: 4421 - DNA, 20 bp, Artificial Sequence
  Chr5q_2 Reverse Primer
ttagggagtcacttctcggg

SEQ ID NO: 4422 - DNA, 20 bp, Artificial Sequence
  Chr5q_2 Reverse Primer
gtgactctaggccaccagga

SEQ ID NO: 4423 - DNA, 20 bp, Artificial Sequence
  Chr5q_2 Reverse Primer
ttgatcatggttcctgtgga

SEQ ID NO: 4424 - DNA, 20 bp, Artificial Sequence
  Chr5q_2 Reverse Primer
ttcattggcttcttggaagg

SEQ ID NO: 4425 - DNA, 21 bp, Artificial Sequence
  Chr5q_2 Reverse Primer
gcttccatcaaacaaatcacc

SEQ ID NO: 4426 - DNA, 20 bp, Artificial Sequence
  Chr5q_2 Reverse Primer
cctggacttgagtgaggagc

SEQ ID NO: 4427 - DNA, 20 bp, Artificial Sequence
  Chr5q_2 Reverse Primer
tgagcagtatgggaagcaaa

SEQ ID NO: 4428 - DNA, 22 bp, Artificial Sequence
  Chr5q_2 Reverse Primer
cattcaacatctaaccagcaca

SEQ ID NO: 4429 - DNA, 20 bp, Artificial Sequence
  Chr5q_2 Reverse Primer
tccagttagttggagggcag

SEQ ID NO: 4430 - DNA, 20 bp, Artificial Sequence
  Chr5q_2 Reverse Primer
cctatgcagtccctctgagc

SEQ ID NO: 4431 - DNA, 20 bp, Artificial Sequence
  Chr5q_2 Reverse Primer
ttccctccggaaggtctatt

SEQ ID NO: 4432 - DNA, 20 bp, Artificial Sequence
  Chr5q_2 Reverse Primer
ggttttcaccagagccacat

SEQ ID NO: 4433 - DNA, 20 bp, Artificial Sequence
  Chr5q_3 Forward Primer
tggagactgggacttgaagg

SEQ ID NO: 4434 - DNA, 20 bp, Artificial Sequence
  Chr5q_3 Forward Primer
atactgttccgaaggggacc

SEQ ID NO: 4435 - DNA, 20 bp, Artificial Sequence
  Chr5q_3 Forward Primer
tgggcaaaaggctgtgtatt

SEQ ID NO: 4436 - DNA, 20 bp, Artificial Sequence
  Chr5q_3 Forward Primer
gtgctttgggtgacagttca

SEQ ID NO: 4437 - DNA, 20 bp, Artificial Sequence
  Chr5q_3 Forward Primer
ggttgccttatgtgactggg

SEQ ID NO: 4438 - DNA, 20 bp, Artificial Sequence
  Chr5q_3 Forward Primer
ggggcttaatcattccccta

SEQ ID NO: 4439 - DNA, 20 bp, Artificial Sequence
  Chr5q_3 Forward Primer
tggacgtgctctttctttcc

SEQ ID NO: 4440 - DNA, 20 bp, Artificial Sequence
  Chr5q_3 Forward Primer
ccagctgatgttctgtgcat

SEQ ID NO: 4441 - DNA, 20 bp, Artificial Sequence
  Chr5q_3 Forward Primer
gtcctgacaagcaactgggt

SEQ ID NO: 4442 - DNA, 20 bp, Artificial Sequence
  Chr5q_3 Forward Primer
ttttcatcagcaagcattgg

SEQ ID NO: 4443 - DNA, 20 bp, Artificial Sequence
  Chr5q_3 Forward Primer
catggtgggttttgtgttca

SEQ ID NO: 4444 - DNA, 21 bp, Artificial Sequence
  Chr5q_3 Forward Primer
gcttcccatggaaaacaactt

SEQ ID NO: 4445 - DNA, 20 bp, Artificial Sequence
  Chr5q_3 Forward Primer
cttacctggggacctgcata

SEQ ID NO: 4446 - DNA, 20 bp, Artificial Sequence
  Chr5q_3 Forward Primer
ggcaaagtatgcgttggttt

SEQ ID NO: 4447 - DNA, 20 bp, Artificial Sequence
  Chr5q_3 Forward Primer
ccccacaaccagtgaactct

SEQ ID NO: 4448 - DNA, 20 bp, Artificial Sequence
  Chr5q_3 Forward Primer
ataagcacagtccctgtggg

SEQ ID NO: 4449 - DNA, 20 bp, Artificial Sequence
  Chr5q_3 Forward Primer
gttgatgatccttcctccca

SEQ ID NO: 4450 - DNA, 20 bp, Artificial Sequence
  Chr5q_3 Forward Primer
ctccccaggattctttaggg

SEQ ID NO: 4451 - DNA, 23 bp, Artificial Sequence
  Chr5q_3 Forward Primer
ccctatacatctggttatcaggc

SEQ ID NO: 4452 - DNA, 20 bp, Artificial Sequence
  Chr5q_3 Forward Primer
tgggggcctttaatcataca

SEQ ID NO: 4453 - DNA, 21 bp, Artificial Sequence
  Chr5q_3 Forward Primer
caacaccatgctgagaagttg

SEQ ID NO: 4454 - DNA, 20 bp, Artificial Sequence
  Chr5q_3 Forward Primer
ctccaacaaggtgtgctgtg

SEQ ID NO: 4455 - DNA, 20 bp, Artificial Sequence
  Chr5q_3 Forward Primer
tccaaagttccttttcaggc

SEQ ID NO: 4456 - DNA, 20 bp, Artificial Sequence
  Chr5q_3 Forward Primer
gaagattccctcttgtggca

SEQ ID NO: 4457 - DNA, 20 bp, Artificial Sequence
  Chr5q_3 Forward Primer
ctactgcatctccacccctc

SEQ ID NO: 4458 - DNA, 20 bp, Artificial Sequence
  Chr5q_3 Forward Primer
aacaagacttggttggggtg

SEQ ID NO: 4459 - DNA, 20 bp, Artificial Sequence
  Chr5q_3 Forward Primer
cgttttcttgccaagtcaca

SEQ ID NO: 4460 - DNA, 20 bp, Artificial Sequence
  Chr5q_3 Forward Primer
caaattctcctaacagggca

SEQ ID NO: 4461 - DNA, 23 bp, Artificial Sequence
  Chr5q_3 Forward Primer
ccaactcaagttcagcaagattt

SEQ ID NO: 4462 - DNA, 21 bp, Artificial Sequence
  Chr5q_3 Forward Primer
ttgaattgcttcccagtgagt

SEQ ID NO: 4463 - DNA, 20 bp, Artificial Sequence
  Chr5q_3 Forward Primer
atgaatgagattggcctgct

SEQ ID NO: 4464 - DNA, 20 bp, Artificial Sequence
  Chr5q_3 Forward Primer
gcagctgtctaggactgggt

SEQ ID NO: 4465 - DNA, 20 bp, Artificial Sequence
  Chr5q_3 Forward Primer
gataccaagggttggtggtg

SEQ ID NO: 4466 - DNA, 20 bp, Artificial Sequence
  Chr5q_3 Forward Primer
tacgtggtgtagccaggatg

SEQ ID NO: 4467 - DNA, 20 bp, Artificial Sequence
  Chr5q_3 Forward Primer
cagctgtcaccactgctagg

SEQ ID NO: 4468 - DNA, 20 bp, Artificial Sequence
  Chr5q_3 Forward Primer
gctgcctacagacggttgac

SEQ ID NO: 4469 - DNA, 20 bp, Artificial Sequence
  Chr5q_3 Forward Primer
tggacatctactctgccgtg

SEQ ID NO: 4470 - DNA, 20 bp, Artificial Sequence
  Chr5q_3 Forward Primer
taactagggctggaagtgcg

SEQ ID NO: 4471 - DNA, 20 bp, Artificial Sequence
  Chr5q_3 Forward Primer
tcttctccgtaggatgtggc

SEQ ID NO: 4472 - DNA, 20 bp, Artificial Sequence
  Chr5q_3 Forward Primer
aaccctcgccacttaaaggt

SEQ ID NO: 4473 - DNA, 20 bp, Artificial Sequence
  Chr5q_3 Forward Primer
tgttgtttcagtgtgacgcc

SEQ ID NO: 4474 - DNA, 20 bp, Artificial Sequence
  Chr5q_3 Forward Primer
tttcctctgaagggaaaggg

SEQ ID NO: 4475 - DNA, 21 bp, Artificial Sequence
  Chr5q_3 Forward Primer
cccatagtgcactgctgtttt

SEQ ID NO: 4476 - DNA, 20 bp, Artificial Sequence
  Chr5q_3 Forward Primer
gacccattcattcccacaag

SEQ ID NO: 4477 - DNA, 21 bp, Artificial Sequence
  Chr5q_3 Forward Primer
cagagggcaagagaattatgg

SEQ ID NO: 4478 - DNA, 20 bp, Artificial Sequence
  Chr5q_3 Forward Primer
aagggatatggacaagtggc

SEQ ID NO: 4479 - DNA, 20 bp, Artificial Sequence
  Chr5q_3 Forward Primer
gctggagtccaagtttctgc

SEQ ID NO: 4480 - DNA, 20 bp, Artificial Sequence
  Chr5q_3 Forward Primer
tctgcgactgtttggttaaa

SEQ ID NO: 4481 - DNA, 22 bp, Artificial Sequence
  Chr5q_3 Forward Primer
aactttaaaacccaagatggca

SEQ ID NO: 4482 - DNA, 23 bp, Artificial Sequence
  Chr5q_3 Forward Primer
cccactttcatttctaacattgc

SEQ ID NO: 4483 - DNA, 20 bp, Artificial Sequence
  Chr5q_3 Forward Primer
gccttaagctttgcaaccac

SEQ ID NO: 4484 - DNA, 20 bp, Artificial Sequence
  Chr5q_3 Forward Primer
aactccttcccatgcgatta

SEQ ID NO: 4485 - DNA, 20 bp, Artificial Sequence
  Chr5q_3 Forward Primer
tgggggacaaatcttgagac

SEQ ID NO: 4486 - DNA, 22 bp, Artificial Sequence
  Chr5q_3 Forward Primer
gctctgtagggagatattggga

SEQ ID NO: 4487 - DNA, 20 bp, Artificial Sequence
  Chr5q_3 Forward Primer
ggggaagggttgaagaagag

SEQ ID NO: 4488 - DNA, 20 bp, Artificial Sequence
  Chr5q_3 Forward Primer
ctctgtgtaggagggaccca

SEQ ID NO: 4489 - DNA, 20 bp, Artificial Sequence
  Chr5q_3 Forward Primer
tccagctactcttccgcatt

SEQ ID NO: 4490 - DNA, 20 bp, Artificial Sequence
  Chr5q_3 Forward Primer
tgtgtgcagactccagaagg

SEQ ID NO: 4491 - DNA, 20 bp, Artificial Sequence
  Chr5q_3 Forward Primer
acagaggatgtggaagtggg

SEQ ID NO: 4492 - DNA, 20 bp, Artificial Sequence
  Chr5q_3 Forward Primer
agcattttctgggctctctg

SEQ ID NO: 4493 - DNA, 20 bp, Artificial Sequence
  Chr5q_3 Forward Primer
ccctttggctgtagtgggta

SEQ ID NO: 4494 - DNA, 20 bp, Artificial Sequence
  Chr5q_3 Forward Primer
aatgcttcccttcctcaatg

SEQ ID NO: 4495 - DNA, 20 bp, Artificial Sequence
  Chr5q_3 Forward Primer
gtatgagcctaggggcagtg

SEQ ID NO: 4496 - DNA, 20 bp, Artificial Sequence
  Chr5q_3 Forward Primer
agcaggcaggtgctagagag

SEQ ID NO: 4497 - DNA, 20 bp, Artificial Sequence
  Chr5q_3 Forward Primer
gagaaagccatttctgggtg

SEQ ID NO: 4498 - DNA, 20 bp, Artificial Sequence
  Chr5q_3 Forward Primer
tagtgggatccagtgctgct

SEQ ID NO: 4499 - DNA, 20 bp, Artificial Sequence
  Chr5q_3 Forward Primer
gcttgtcacgtaccaacagc

SEQ ID NO: 4500 - DNA, 20 bp, Artificial Sequence
  Chr5q_3 Forward Primer
gctgtacatttccaatgggc

SEQ ID NO: 4501 - DNA, 21 bp, Artificial Sequence
  Chr5q_3 Forward Primer
tcaggctcaatctggttgttc

SEQ ID NO: 4502 - DNA, 20 bp, Artificial Sequence
  Chr5q_3 Forward Primer
tgtttgctggtctttagcga

SEQ ID NO: 4503 - DNA, 20 bp, Artificial Sequence
  Chr5q_3 Forward Primer
tcctcattcagctgaccctt

SEQ ID NO: 4504 - DNA, 20 bp, Artificial Sequence
  Chr5q_3 Forward Primer
taactactgcgctctgctgc

SEQ ID NO: 4505 - DNA, 20 bp, Artificial Sequence
  Chr5q_3 Forward Primer
aaaacctgtgaactgagggg

SEQ ID NO: 4506 - DNA, 20 bp, Artificial Sequence
  Chr5q_3 Forward Primer
tgaggaagctgaaggctttt

SEQ ID NO: 4507 - DNA, 20 bp, Artificial Sequence
  Chr5q_3 Forward Primer
cattgatgggaaaccacctt

SEQ ID NO: 4508 - DNA, 20 bp, Artificial Sequence
  Chr5q_3 Forward Primer
tgtacagagggtttggggaa

SEQ ID NO: 4509 - DNA, 22 bp, Artificial Sequence
  Chr5q_3 Forward Primer
tccagtgataattcagcctctg

SEQ ID NO: 4510 - DNA, 22 bp, Artificial Sequence
  Chr5q_3 Forward Primer
ggtgtaaaacgctacctcattg

SEQ ID NO: 4511 - DNA, 20 bp, Artificial Sequence
  Chr5q_3 Forward Primer
atccctgagacaatcatggc

SEQ ID NO: 4512 - DNA, 20 bp, Artificial Sequence
  Chr5q_3 Forward Primer
gtgctgttttcctaagccct

SEQ ID NO: 4513 - DNA, 22 bp, Artificial Sequence
  Chr5q_3 Forward Primer
tcattctttccaaagtttgctc

SEQ ID NO: 4514 - DNA, 20 bp, Artificial Sequence
  Chr5q_3 Forward Primer
ggtcagatccatgcacacac

SEQ ID NO: 4515 - DNA, 20 bp, Artificial Sequence
  Chr5q_3 Forward Primer
tccatgctcttggaatcaca

SEQ ID NO: 4516 - DNA, 20 bp, Artificial Sequence
  Chr5q_3 Forward Primer
cagtcatcctccaaaatggc

SEQ ID NO: 4517 - DNA, 22 bp, Artificial Sequence
  Chr5q_3 Forward Primer
cccaggtatctgttactttccc

SEQ ID NO: 4518 - DNA, 20 bp, Artificial Sequence
  Chr5q_3 Forward Primer
tgtctgcttgacaggacacc

SEQ ID NO: 4519 - DNA, 20 bp, Artificial Sequence
  Chr5q_3 Forward Primer
attggtgttgtggatgcctt

SEQ ID NO: 4520 - DNA, 20 bp, Artificial Sequence
  Chr5q_3 Forward Primer
cttgaagggtgccatctttg

SEQ ID NO: 4521 - DNA, 20 bp, Artificial Sequence
  Chr5q_3 Forward Primer
tgaatgcaaccatgctcttc

SEQ ID NO: 4522 - DNA, 20 bp, Artificial Sequence
  Chr5q_3 Forward Primer
ggctgtcaatgaggtgatga

SEQ ID NO: 4523 - DNA, 20 bp, Artificial Sequence
  Chr5q_3 Forward Primer
agtgctgccaggtctctcat

SEQ ID NO: 4524 - DNA, 20 bp, Artificial Sequence
  Chr5q_3 Forward Primer
cctctggcccaagtaactca

SEQ ID NO: 4525 - DNA, 20 bp, Artificial Sequence
  Chr5q_3 Forward Primer
cccctggaatggagtgacta

SEQ ID NO: 4526 - DNA, 20 bp, Artificial Sequence
  Chr5q_3 Forward Primer
cttaggggattgtccacagg

SEQ ID NO: 4527 - DNA, 20 bp, Artificial Sequence
  Chr5q_3 Forward Primer
ttatagattgggccacaggc

SEQ ID NO: 4528 - DNA, 20 bp, Artificial Sequence
  Chr5q_3 Forward Primer
catattggcagaggcattga

SEQ ID NO: 4529 - DNA, 20 bp, Artificial Sequence
  Chr5q_3 Reverse Primer
attattgcctgtgggtcagg

SEQ ID NO: 4530 - DNA, 20 bp, Artificial Sequence
  Chr5q_3 Reverse Primer
taccaagtttgcttgagggg

SEQ ID NO: 4531 - DNA, 20 bp, Artificial Sequence
  Chr5q_3 Reverse Primer
tgccagttccaagatcacat

SEQ ID NO: 4532 - DNA, 20 bp, Artificial Sequence
  Chr5q_3 Reverse Primer
ttctgccttcctttccacac

SEQ ID NO: 4533 - DNA, 20 bp, Artificial Sequence
  Chr5q_3 Reverse Primer
aaagagcgtgggtgaagaaa

SEQ ID NO: 4534 - DNA, 20 bp, Artificial Sequence
  Chr5q_3 Reverse Primer
gtcggaggaggtctcattca

SEQ ID NO: 4535 - DNA, 20 bp, Artificial Sequence
  Chr5q_3 Reverse Primer
accaggaaacagaatggtgg

SEQ ID NO: 4536 - DNA, 20 bp, Artificial Sequence
  Chr5q_3 Reverse Primer
gcagattagagccacttggg

SEQ ID NO: 4537 - DNA, 20 bp, Artificial Sequence
  Chr5q_3 Reverse Primer
agcaagtggcttcgaaatgt

SEQ ID NO: 4538 - DNA, 20 bp, Artificial Sequence
  Chr5q_3 Reverse Primer
atgatgctttttgcccagac

SEQ ID NO: 4539 - DNA, 20 bp, Artificial Sequence
  Chr5q_3 Reverse Primer
agtctccaagtgcaagcgtt

SEQ ID NO: 4540 - DNA, 22 bp, Artificial Sequence
  Chr5q_3 Reverse Primer
gaatccagatcctctgaaaacc

SEQ ID NO: 4541 - DNA, 21 bp, Artificial Sequence
  Chr5q_3 Reverse Primer
cagcagagatttccactgtcc

SEQ ID NO: 4542 - DNA, 20 bp, Artificial Sequence
  Chr5q_3 Reverse Primer
caaggctaccactccctctg

SEQ ID NO: 4543 - DNA, 20 bp, Artificial Sequence
  Chr5q_3 Reverse Primer
ccattaattgactgctgcga

SEQ ID NO: 4544 - DNA, 20 bp, Artificial Sequence
  Chr5q_3 Reverse Primer
atcacgttggcttggcttac

SEQ ID NO: 4545 - DNA, 20 bp, Artificial Sequence
  Chr5q_3 Reverse Primer
ctgtgcaggacaggagtttg

SEQ ID NO: 4546 - DNA, 20 bp, Artificial Sequence
  Chr5q_3 Reverse Primer
tggcctctctcaacagttcc

SEQ ID NO: 4547 - DNA, 19 bp, Artificial Sequence
  Chr5q_3 Reverse Primer
ggctccatcacaccatgag

SEQ ID NO: 4548 - DNA, 20 bp, Artificial Sequence
  Chr5q_3 Reverse Primer
cacagctccaccaaagtcaa

SEQ ID NO: 4549 - DNA, 20 bp, Artificial Sequence
  Chr5q_3 Reverse Primer
tttacatgccaccgctaaca

SEQ ID NO: 4550 - DNA, 20 bp, Artificial Sequence
  Chr5q_3 Reverse Primer
tggatccaataaacaggtgg

SEQ ID NO: 4551 - DNA, 20 bp, Artificial Sequence
  Chr5q_3 Reverse Primer
ctgagtcctaggggatgggt

SEQ ID NO: 4552 - DNA, 20 bp, Artificial Sequence
  Chr5q_3 Reverse Primer
tctgggtgccctatatgctc

SEQ ID NO: 4553 - DNA, 20 bp, Artificial Sequence
  Chr5q_3 Reverse Primer
gctctccactcttcctccct

SEQ ID NO: 4554 - DNA, 21 bp, Artificial Sequence
  Chr5q_3 Reverse Primer
aatgagaaggtcatggcagaa

SEQ ID NO: 4555 - DNA, 20 bp, Artificial Sequence
  Chr5q_3 Reverse Primer
cctccagtcctgctctttga

SEQ ID NO: 4556 - DNA, 20 bp, Artificial Sequence
  Chr5q_3 Reverse Primer
caggggcatctttgtcactt

SEQ ID NO: 4557 - DNA, 20 bp, Artificial Sequence
  Chr5q_3 Reverse Primer
tgcaaaaaccatctccagtg

SEQ ID NO: 4558 - DNA, 21 bp, Artificial Sequence
  Chr5q_3 Reverse Primer
cctgtatttccaaaaggctca

SEQ ID NO: 4559 - DNA, 20 bp, Artificial Sequence
  Chr5q_3 Reverse Primer
ccatagttcaccaccaacca

SEQ ID NO: 4560 - DNA, 20 bp, Artificial Sequence
  Chr5q_3 Reverse Primer
acttgggagaacaatgtggc

SEQ ID NO: 4561 - DNA, 20 bp, Artificial Sequence
  Chr5q_3 Reverse Primer
tccaagcctcagctttctct

SEQ ID NO: 4562 - DNA, 20 bp, Artificial Sequence
  Chr5q_3 Reverse Primer
gagcaccttactctgtgggg

SEQ ID NO: 4563 - DNA, 20 bp, Artificial Sequence
  Chr5q_3 Reverse Primer
gctagagcgcagagaacagg

SEQ ID NO: 4564 - DNA, 20 bp, Artificial Sequence
  Chr5q_3 Reverse Primer
cagaggtagcatcagcagca

SEQ ID NO: 4565 - DNA, 20 bp, Artificial Sequence
  Chr5q_3 Reverse Primer
gtgagctcgagacgctcttc

SEQ ID NO: 4566 - DNA, 20 bp, Artificial Sequence
  Chr5q_3 Reverse Primer
tcttggaaaaacacgggaag

SEQ ID NO: 4567 - DNA, 20 bp, Artificial Sequence
  Chr5q_3 Reverse Primer
catcacatttcctggctcct

SEQ ID NO: 4568 - DNA, 20 bp, Artificial Sequence
  Chr5q_3 Reverse Primer
gttcccaacaggcaagtctc

SEQ ID NO: 4569 - DNA, 20 bp, Artificial Sequence
  Chr5q_3 Reverse Primer
tgcttaagccaaactccagg

SEQ ID NO: 4570 - DNA, 20 bp, Artificial Sequence
  Chr5q_3 Reverse Primer
attctgccatgccacataca

SEQ ID NO: 4571 - DNA, 20 bp, Artificial Sequence
  Chr5q_3 Reverse Primer
catcgctgcaatcaaagaaa

SEQ ID NO: 4572 - DNA, 20 bp, Artificial Sequence
  Chr5q_3 Reverse Primer
acccttggaaatgtgacctc

SEQ ID NO: 4573 - DNA, 20 bp, Artificial Sequence
  Chr5q_3 Reverse Primer
attcaaacggaaacacagcc

SEQ ID NO: 4574 - DNA, 21 bp, Artificial Sequence
  Chr5q_3 Reverse Primer
ttgataaaatgggaaggcaaa

SEQ ID NO: 4575 - DNA, 20 bp, Artificial Sequence
  Chr5q_3 Reverse Primer
ggactcatgatggggacaag

SEQ ID NO: 4576 - DNA, 25 bp, Artificial Sequence
  Chr5q_3 Reverse Primer
aaattcaaaatcttagctcttcctt

SEQ ID NO: 4577 - DNA, 20 bp, Artificial Sequence
  Chr5q_3 Reverse Primer
tttgaatccaatgccagtga

SEQ ID NO: 4578 - DNA, 23 bp, Artificial Sequence
  Chr5q_3 Reverse Primer
ttaaaacaccaaactattgggaa

SEQ ID NO: 4579 - DNA, 22 bp, Artificial Sequence
  Chr5q_3 Reverse Primer
tgcaagagcaaagtaaaaccaa

SEQ ID NO: 4580 - DNA, 20 bp, Artificial Sequence
  Chr5q_3 Reverse Primer
ttccattgaaagggctcaac

SEQ ID NO: 4581 - DNA, 20 bp, Artificial Sequence
  Chr5q_3 Reverse Primer
cgaaaaagaggctgtggaaa

SEQ ID NO: 4582 - DNA, 27 bp, Artificial Sequence
  Chr5q_3 Reverse Primer
gaacacaggattttattactgcttatg

SEQ ID NO: 4583 - DNA, 20 bp, Artificial Sequence
  Chr5q_3 Reverse Primer
actgcatctggcctagcaat

SEQ ID NO: 4584 - DNA, 20 bp, Artificial Sequence
  Chr5q_3 Reverse Primer
cagaaccaaagggatggaaa

SEQ ID NO: 4585 - DNA, 20 bp, Artificial Sequence
  Chr5q_3 Reverse Primer
attaaaactgggggtgggtc

SEQ ID NO: 4586 - DNA, 20 bp, Artificial Sequence
  Chr5q_3 Reverse Primer
tccttttcctgagggacatc

SEQ ID NO: 4587 - DNA, 20 bp, Artificial Sequence
  Chr5q_3 Reverse Primer
atcagtggctttacgcatcc

SEQ ID NO: 4588 - DNA, 20 bp, Artificial Sequence
  Chr5q_3 Reverse Primer
ttcaagcgccctaagtctgt

SEQ ID NO: 4589 - DNA, 25 bp, Artificial Sequence
  Chr5q_3 Reverse Primer
tcaatttttgtgaaaatagcaataa

SEQ ID NO: 4590 - DNA, 20 bp, Artificial Sequence
  Chr5q_3 Reverse Primer
atttccttgcgatctcacca

SEQ ID NO: 4591 - DNA, 20 bp, Artificial Sequence
  Chr5q_3 Reverse Primer
agccccaaccagtttcctat

SEQ ID NO: 4592 - DNA, 18 bp, Artificial Sequence
  Chr5q_3 Reverse Primer
actgcccaacagcttcca

SEQ ID NO: 4593 - DNA, 20 bp, Artificial Sequence
  Chr5q_3 Reverse Primer
ctgccctgccagttacagtt

SEQ ID NO: 4594 - DNA, 21 bp, Artificial Sequence
  Chr5q_3 Reverse Primer
ccctttgtgatgcatctctct

SEQ ID NO: 4595 - DNA, 22 bp, Artificial Sequence
  Chr5q_3 Reverse Primer
ttcatttcccctttaaccttga

SEQ ID NO: 4596 - DNA, 20 bp, Artificial Sequence
  Chr5q_3 Reverse Primer
tggggtgagtagggaatcag

SEQ ID NO: 4597 - DNA, 20 bp, Artificial Sequence
  Chr5q_3 Reverse Primer
agtttctctccccacccact

SEQ ID NO: 4598 - DNA, 20 bp, Artificial Sequence
  Chr5q_3 Reverse Primer
ccgtggagttgtgcaatatg

SEQ ID NO: 4599 - DNA, 19 bp, Artificial Sequence
  Chr5q_3 Reverse Primer
atccccttcggacactcac

SEQ ID NO: 4600 - DNA, 20 bp, Artificial Sequence
  Chr5q_3 Reverse Primer
ggcagagaaaccaacacaca

SEQ ID NO: 4601 - DNA, 20 bp, Artificial Sequence
  Chr5q_3 Reverse Primer
gaaaagagccccaaatccat

SEQ ID NO: 4602 - DNA, 20 bp, Artificial Sequence
  Chr5q_3 Reverse Primer
aacgtggggaaaggactcat

SEQ ID NO: 4603 - DNA, 22 bp, Artificial Sequence
  Chr5q_3 Reverse Primer
cagctgacttttattgagtgcc

SEQ ID NO: 4604 - DNA, 26 bp, Artificial Sequence
  Chr5q_3 Reverse Primer
aaaaatctggaaaacatagaagaatg

SEQ ID NO: 4605 - DNA, 26 bp, Artificial Sequence
  Chr5q_3 Reverse Primer
ccacattaaacaggtaaaaagaaaca

SEQ ID NO: 4606 - DNA, 20 bp, Artificial Sequence
  Chr5q_3 Reverse Primer
ccagccaaggattagtttcc

SEQ ID NO: 4607 - DNA, 21 bp, Artificial Sequence
  Chr5q_3 Reverse Primer
tcaagagcagaagagggaaaa

SEQ ID NO: 4608 - DNA, 21 bp, Artificial Sequence
  Chr5q_3 Reverse Primer
cctctttctcctttcctggag

SEQ ID NO: 4609 - DNA, 20 bp, Artificial Sequence
  Chr5q_3 Reverse Primer
gaactgacgcaggaaacaca

SEQ ID NO: 4610 - DNA, 20 bp, Artificial Sequence
  Chr5q_3 Reverse Primer
ccttggatccttggacagag

SEQ ID NO: 4611 - DNA, 20 bp, Artificial Sequence
  Chr5q_3 Reverse Primer
gaacccctctccttctggtc

SEQ ID NO: 4612 - DNA, 20 bp, Artificial Sequence
  Chr5q_3 Reverse Primer
tccaaaagtgggcatttctc

SEQ ID NO: 4613 - DNA, 21 bp, Artificial Sequence
  Chr5q_3 Reverse Primer
gatgagatgggtgagaaaacg

SEQ ID NO: 4614 - DNA, 20 bp, Artificial Sequence
  Chr5q_3 Reverse Primer
tgggacattgacattggcta

SEQ ID NO: 4615 - DNA, 26 bp, Artificial Sequence
  Chr5q_3 Reverse Primer
tctcccttttgagagatagatagagg

SEQ ID NO: 4616 - DNA, 20 bp, Artificial Sequence
  Chr5q_3 Reverse Primer
attacctccctgccaaacct

SEQ ID NO: 4617 - DNA, 20 bp, Artificial Sequence
  Chr5q_3 Reverse Primer
aaaccagtatccggcattca

SEQ ID NO: 4618 - DNA, 20 bp, Artificial Sequence
  Chr5q_3 Reverse Primer
cctctcctcggagacatcag

SEQ ID NO: 4619 - DNA, 20 bp, Artificial Sequence
  Chr5q_3 Reverse Primer
atgccacccactcaggtaaa

SEQ ID NO: 4620 - DNA, 20 bp, Artificial Sequence
  Chr5q_3 Reverse Primer
tcttggcctgtcccataatc

SEQ ID NO: 4621 - DNA, 20 bp, Artificial Sequence
  Chr5q_3 Reverse Primer
accaaaccagagcccctact

SEQ ID NO: 4622 - DNA, 20 bp, Artificial Sequence
  Chr5q_3 Reverse Primer
gggatgttggaaaatgctgt

SEQ ID NO: 4623 - DNA, 20 bp, Artificial Sequence
  Chr5q_3 Reverse Primer
gggtaaacatgagagctgcc

SEQ ID NO: 4624 - DNA, 20 bp, Artificial Sequence
  Chr5q_3 Reverse Primer
tcattggtccctactggtcc

SEQ ID NO: 4625 - DNA, 24 bp, Artificial Sequence
  Chr5q_4 Forward Primer
tccatagtcctgaaattcaaagaa

SEQ ID NO: 4626 - DNA, 25 bp, Artificial Sequence
  Chr5q_4 Forward Primer
aaaaagtctgctatgagagtatcca

SEQ ID NO: 4627 - DNA, 20 bp, Artificial Sequence
  Chr5q_4 Forward Primer
ctgaacccaacacccaattc

SEQ ID NO: 4628 - DNA, 20 bp, Artificial Sequence
  Chr5q_4 Forward Primer
ccaatctagcatagcctccc

SEQ ID NO: 4629 - DNA, 20 bp, Artificial Sequence
  Chr5q_4 Forward Primer
ttcacgtgagccaattatgg

SEQ ID NO: 4630 - DNA, 20 bp, Artificial Sequence
  Chr5q_4 Forward Primer
cgatcctgaaccctgatgtt

SEQ ID NO: 4631 - DNA, 20 bp, Artificial Sequence
  Chr5q_4 Forward Primer
gcagacaagtgccaaacaaa

SEQ ID NO: 4632 - DNA, 27 bp, Artificial Sequence
  Chr5q_4 Forward Primer
tcatattaatttcaggtaagagccttt

SEQ ID NO: 4633 - DNA, 22 bp, Artificial Sequence
  Chr5q_4 Forward Primer
gccatgaagcaaaattaacaga

SEQ ID NO: 4634 - DNA, 20 bp, Artificial Sequence
  Chr5q_4 Forward Primer
atgccactgcattgagactg

SEQ ID NO: 4635 - DNA, 20 bp, Artificial Sequence
  Chr5q_4 Forward Primer
cccttcagctcaccttttgt

SEQ ID NO: 4636 - DNA, 21 bp, Artificial Sequence
  Chr5q_4 Forward Primer
gcatacgcttacagaggctca

SEQ ID NO: 4637 - DNA, 20 bp, Artificial Sequence
  Chr5q_4 Forward Primer
actgcaacctgggtattcca

SEQ ID NO: 4638 - DNA, 20 bp, Artificial Sequence
  Chr5q_4 Forward Primer
gggaacatcctggagactga

SEQ ID NO: 4639 - DNA, 20 bp, Artificial Sequence
  Chr5q_4 Forward Primer
aaggggagaacaaggtgatg

SEQ ID NO: 4640 - DNA, 20 bp, Artificial Sequence
  Chr5q_4 Forward Primer
gccagttactctttctgcgg

SEQ ID NO: 4641 - DNA, 20 bp, Artificial Sequence
  Chr5q_4 Forward Primer
agggtgcaccagtggttaag

SEQ ID NO: 4642 - DNA, 20 bp, Artificial Sequence
  Chr5q_4 Forward Primer
gcacacaggatggcaaataa

SEQ ID NO: 4643 - DNA, 20 bp, Artificial Sequence
  Chr5q_4 Forward Primer
tctaaatcccacctccctcc

SEQ ID NO: 4644 - DNA, 23 bp, Artificial Sequence
  Chr5q_4 Forward Primer
tgactccttttgcagaatgtttt

SEQ ID NO: 4645 - DNA, 20 bp, Artificial Sequence
  Chr5q_4 Forward Primer
tcaactctcccaccaagatg

SEQ ID NO: 4646 - DNA, 20 bp, Artificial Sequence
  Chr5q_4 Forward Primer
ttttcctggtgggaaatcac

SEQ ID NO: 4647 - DNA, 20 bp, Artificial Sequence
  Chr5q_4 Forward Primer
tacgcagctatttctgtgcg

SEQ ID NO: 4648 - DNA, 20 bp, Artificial Sequence
  Chr5q_4 Forward Primer
ccccacaactgtaaccaagc

SEQ ID NO: 4649 - DNA, 20 bp, Artificial Sequence
  Chr5q_4 Forward Primer
tttccctcaatcacccaaac

SEQ ID NO: 4650 - DNA, 18 bp, Artificial Sequence
  Chr5q_4 Forward Primer
gaggagaaactgcggcct

SEQ ID NO: 4651 - DNA, 20 bp, Artificial Sequence
  Chr5q_4 Forward Primer
cctctgtaagaggtgagcgg

SEQ ID NO: 4652 - DNA, 20 bp, Artificial Sequence
  Chr5q_4 Forward Primer
gtgtacaaagctgtgccagg

SEQ ID NO: 4653 - DNA, 20 bp, Artificial Sequence
  Chr5q_4 Forward Primer
agctatgggaggagagggaa

SEQ ID NO: 4654 - DNA, 22 bp, Artificial Sequence
  Chr5q_4 Forward Primer
aaaaggacaaaaattaagccaa

SEQ ID NO: 4655 - DNA, 20 bp, Artificial Sequence
  Chr5q_4 Forward Primer
ctgagccagtcagcctctct

SEQ ID NO: 4656 - DNA, 20 bp, Artificial Sequence
  Chr5q_4 Forward Primer
cttctcagacaccctcctgc

SEQ ID NO: 4657 - DNA, 20 bp, Artificial Sequence
  Chr5q_4 Forward Primer
agctccacgtggttcttgtg

SEQ ID NO: 4658 - DNA, 23 bp, Artificial Sequence
  Chr5q_4 Forward Primer
tgaatagccatggtttaatttgc

SEQ ID NO: 4659 - DNA, 20 bp, Artificial Sequence
  Chr5q_4 Forward Primer
ctcagcagctacctgaacca

SEQ ID NO: 4660 - DNA, 20 bp, Artificial Sequence
  Chr5q_4 Forward Primer
cagcaatgtcaccagaatgg

SEQ ID NO: 4661 - DNA, 21 bp, Artificial Sequence
  Chr5q_4 Forward Primer
cagtgcatgagacctcagaaa

SEQ ID NO: 4662 - DNA, 22 bp, Artificial Sequence
  Chr5q_4 Forward Primer
ccacttttcatttcaaatcgtt

SEQ ID NO: 4663 - DNA, 20 bp, Artificial Sequence
  Chr5q_4 Forward Primer
cactcccaggcagaagagac

SEQ ID NO: 4664 - DNA, 24 bp, Artificial Sequence
  Chr5q_4 Forward Primer
accaatatgttaggagacatggtg

SEQ ID NO: 4665 - DNA, 20 bp, Artificial Sequence
  Chr5q_4 Forward Primer
cactggctggatttttgtca

SEQ ID NO: 4666 - DNA, 25 bp, Artificial Sequence
  Chr5q_4 Forward Primer
cagtgtcatttccttctgttagaaa

SEQ ID NO: 4667 - DNA, 20 bp, Artificial Sequence
  Chr5q_4 Forward Primer
ttgccattgccaatcataag

SEQ ID NO: 4668 - DNA, 20 bp, Artificial Sequence
  Chr5q_4 Forward Primer
cagagaacagaaggatcccg

SEQ ID NO: 4669 - DNA, 20 bp, Artificial Sequence
  Chr5q_4 Forward Primer
attagagactcgggggcact

SEQ ID NO: 4670 - DNA, 20 bp, Artificial Sequence
  Chr5q_4 Forward Primer
caaatttttccaaccatccc

SEQ ID NO: 4671 - DNA, 20 bp, Artificial Sequence
  Chr5q_4 Forward Primer
cttgggcagtaccattcgtt

SEQ ID NO: 4672 - DNA, 20 bp, Artificial Sequence
  Chr5q_4 Forward Primer
aaatcactcactgcctggct

SEQ ID NO: 4673 - DNA, 20 bp, Artificial Sequence
  Chr5q_4 Forward Primer
acagcaccaacatccatcaa

SEQ ID NO: 4674 - DNA, 20 bp, Artificial Sequence
  Chr5q_4 Forward Primer
ctccccaaggtgatcttctg

SEQ ID NO: 4675 - DNA, 20 bp, Artificial Sequence
  Chr5q_4 Forward Primer
tggaagatcaattccccaga

SEQ ID NO: 4676 - DNA, 22 bp, Artificial Sequence
  Chr5q_4 Forward Primer
ccaggtacacagtggttctcaa

SEQ ID NO: 4677 - DNA, 20 bp, Artificial Sequence
  Chr5q_4 Forward Primer
cagagttgtggtgagcagga

SEQ ID NO: 4678 - DNA, 20 bp, Artificial Sequence
  Chr5q_4 Forward Primer
gcacctacagcttttgggag

SEQ ID NO: 4679 - DNA, 20 bp, Artificial Sequence
  Chr5q_4 Forward Primer
gtgcccaagatagtcccgta

SEQ ID NO: 4680 - DNA, 20 bp, Artificial Sequence
  Chr5q_4 Forward Primer
aatcagctgtagcaatgggg

SEQ ID NO: 4681 - DNA, 20 bp, Artificial Sequence
  Chr5q_4 Forward Primer
ccggtcaatcaacacttcaa

SEQ ID NO: 4682 - DNA, 20 bp, Artificial Sequence
  Chr5q_4 Forward Primer
tgcttgatgcttgaatggag

SEQ ID NO: 4683 - DNA, 20 bp, Artificial Sequence
  Chr5q_4 Forward Primer
tgaatagccttggggagcta

SEQ ID NO: 4684 - DNA, 21 bp, Artificial Sequence
  Chr5q_4 Forward Primer
catttcaaaagactgggcaaa

SEQ ID NO: 4685 - DNA, 20 bp, Artificial Sequence
  Chr5q_4 Forward Primer
atcattcagaccttggctgc

SEQ ID NO: 4686 - DNA, 20 bp, Artificial Sequence
  Chr5q_4 Forward Primer
ctgtctggccaaaatgtcct

SEQ ID NO: 4687 - DNA, 21 bp, Artificial Sequence
  Chr5q_4 Forward Primer
ccagtgggaatgaaatgaaaa

SEQ ID NO: 4688 - DNA, 20 bp, Artificial Sequence
  Chr5q_4 Forward Primer
tcctcatccctcggaattta

SEQ ID NO: 4689 - DNA, 20 bp, Artificial Sequence
  Chr5q_4 Forward Primer
tccatttatcatggcccaat

SEQ ID NO: 4690 - DNA, 20 bp, Artificial Sequence
  Chr5q_4 Forward Primer
agagctctgtccactcaggc

SEQ ID NO: 4691 - DNA, 23 bp, Artificial Sequence
  Chr5q_4 Forward Primer
tggcctatggaaaataatacaca

SEQ ID NO: 4692 - DNA, 20 bp, Artificial Sequence
  Chr5q_4 Forward Primer
cgtcacctttgccagaaaat

SEQ ID NO: 4693 - DNA, 20 bp, Artificial Sequence
  Chr5q_4 Forward Primer
acgtgtgcatcaaattaccg

SEQ ID NO: 4694 - DNA, 20 bp, Artificial Sequence
  Chr5q_4 Forward Primer
gggacgaggactcacctaca

SEQ ID NO: 4695 - DNA, 23 bp, Artificial Sequence
  Chr5q_4 Forward Primer
tgcttgtatttgttgacatcctg

SEQ ID NO: 4696 - DNA, 20 bp, Artificial Sequence
  Chr5q_4 Forward Primer
gaagcttcctcgcacagaac

SEQ ID NO: 4697 - DNA, 21 bp, Artificial Sequence
  Chr5q_4 Forward Primer
cactgaatcactatggggagg

SEQ ID NO: 4698 - DNA, 20 bp, Artificial Sequence
  Chr5q_4 Forward Primer
ctgagaggccaagaaacagc

SEQ ID NO: 4699 - DNA, 20 bp, Artificial Sequence
  Chr5q_4 Forward Primer
ccaaagttgccaggaaatgt

SEQ ID NO: 4700 - DNA, 20 bp, Artificial Sequence
  Chr5q_4 Forward Primer
tgacccatggtcctagatgc

SEQ ID NO: 4701 - DNA, 24 bp, Artificial Sequence
  Chr5q_4 Forward Primer
aaaacaaaatatgcttcacagagc

SEQ ID NO: 4702 - DNA, 20 bp, Artificial Sequence
  Chr5q_4 Forward Primer
ccaaaacacgctttggaaat

SEQ ID NO: 4703 - DNA, 20 bp, Artificial Sequence
  Chr5q_4 Forward Primer
tgggatttgtaccgtcttcc

SEQ ID NO: 4704 - DNA, 20 bp, Artificial Sequence
  Chr5q_4 Forward Primer
gacgctgctttcgtacccta

SEQ ID NO: 4705 - DNA, 20 bp, Artificial Sequence
  Chr5q_4 Forward Primer
gcatgtattgggcatctgtg

SEQ ID NO: 4706 - DNA, 20 bp, Artificial Sequence
  Chr5q_4 Forward Primer
gatgcccagaggagtgtgtt

SEQ ID NO: 4707 - DNA, 20 bp, Artificial Sequence
  Chr5q_4 Forward Primer
cctgtattcctcaaggcacc

SEQ ID NO: 4708 - DNA, 20 bp, Artificial Sequence
  Chr5q_4 Forward Primer
tcctatccaggccaaatcct

SEQ ID NO: 4709 - DNA, 20 bp, Artificial Sequence
  Chr5q_4 Forward Primer
aatgacctggggactttgtg

SEQ ID NO: 4710 - DNA, 20 bp, Artificial Sequence
  Chr5q_4 Forward Primer
ggagtttatgtttgtcgccg

SEQ ID NO: 4711 - DNA, 20 bp, Artificial Sequence
  Chr5q_4 Forward Primer
aggttgcatatgggatggaa

SEQ ID NO: 4712 - DNA, 20 bp, Artificial Sequence
  Chr5q_4 Forward Primer
tgtattccatcatgccctca

SEQ ID NO: 4713 - DNA, 20 bp, Artificial Sequence
  Chr5q_4 Forward Primer
tcaacagataacccggaagg

SEQ ID NO: 4714 - DNA, 20 bp, Artificial Sequence
  Chr5q_4 Forward Primer
cctgagctgaggagaggaga

SEQ ID NO: 4715 - DNA, 22 bp, Artificial Sequence
  Chr5q_4 Forward Primer
tccagatccaataatgaaatga

SEQ ID NO: 4716 - DNA, 20 bp, Artificial Sequence
  Chr5q_4 Forward Primer
ggtggcagttataaaagcgg

SEQ ID NO: 4717 - DNA, 20 bp, Artificial Sequence
  Chr5q_4 Forward Primer
ttccctggaatgcaactgat

SEQ ID NO: 4718 - DNA, 20 bp, Artificial Sequence
  Chr5q_4 Forward Primer
gccctttctgccatctacag

SEQ ID NO: 4719 - DNA, 20 bp, Artificial Sequence
  Chr5q_4 Forward Primer
ttgtgctctgagaaacccag

SEQ ID NO: 4720 - DNA, 20 bp, Artificial Sequence
  Chr5q_4 Forward Primer
atgccacactatgtccccat

SEQ ID NO: 4721 - DNA, 20 bp, Artificial Sequence
  Chr5q_4 Reverse Primer
ttagcacagtggttgcaagg

SEQ ID NO: 4722 - DNA, 27 bp, Artificial Sequence
  Chr5q_4 Reverse Primer
gattgatatcttttatctttcaaaccc

SEQ ID NO: 4723 - DNA, 20 bp, Artificial Sequence
  Chr5q_4 Reverse Primer
ggagaggacatttcaacgga

SEQ ID NO: 4724 - DNA, 21 bp, Artificial Sequence
  Chr5q_4 Reverse Primer
tgggatctttagcaaggaaga

SEQ ID NO: 4725 - DNA, 20 bp, Artificial Sequence
  Chr5q_4 Reverse Primer
tcccagcatcactcccttac

SEQ ID NO: 4726 - DNA, 20 bp, Artificial Sequence
  Chr5q_4 Reverse Primer
ccctcaaatccagtaggctg

SEQ ID NO: 4727 - DNA, 27 bp, Artificial Sequence
  Chr5q_4 Reverse Primer
aaaaaccaagagctactttattaatgg

SEQ ID NO: 4728 - DNA, 27 bp, Artificial Sequence
  Chr5q_4 Reverse Primer
aattgtaggtgttaaagagtatggttg

SEQ ID NO: 4729 - DNA, 23 bp, Artificial Sequence
  Chr5q_4 Reverse Primer
caaacttcagttggtgtcatttc

SEQ ID NO: 4730 - DNA, 20 bp, Artificial Sequence
  Chr5q_4 Reverse Primer
tggaaatatggactgcctgg

SEQ ID NO: 4731 - DNA, 24 bp, Artificial Sequence
  Chr5q_4 Reverse Primer
tgttaatatctgaagcgtttggaa

SEQ ID NO: 4732 - DNA, 20 bp, Artificial Sequence
  Chr5q_4 Reverse Primer
accattgcattaatcctggg

SEQ ID NO: 4733 - DNA, 22 bp, Artificial Sequence
  Chr5q_4 Reverse Primer
ttgaaagttttcagtttcacgc

SEQ ID NO: 4734 - DNA, 20 bp, Artificial Sequence
  Chr5q_4 Reverse Primer
cattaaggtaccccctgcaa

SEQ ID NO: 4735 - DNA, 25 bp, Artificial Sequence
  Chr5q_4 Reverse Primer
gccagaaactacaagaatcaaactg

SEQ ID NO: 4736 - DNA, 20 bp, Artificial Sequence
  Chr5q_4 Reverse Primer
tatggtgtgggagaaggcac

SEQ ID NO: 4737 - DNA, 20 bp, Artificial Sequence
  Chr5q_4 Reverse Primer
gaaaacaggaaagctgggtt

SEQ ID NO: 4738 - DNA, 22 bp, Artificial Sequence
  Chr5q_4 Reverse Primer
ggtgccttctaataccaaaagc

SEQ ID NO: 4739 - DNA, 26 bp, Artificial Sequence
  Chr5q_4 Reverse Primer
tgttttgtctttcattaggaagtcac

SEQ ID NO: 4740 - DNA, 25 bp, Artificial Sequence
  Chr5q_4 Reverse Primer
tgaaggtaggaatcttgaagtcatc

SEQ ID NO: 4741 - DNA, 20 bp, Artificial Sequence
  Chr5q_4 Reverse Primer
ttcatttcaattggcagcag

SEQ ID NO: 4742 - DNA, 20 bp, Artificial Sequence
  Chr5q_4 Reverse Primer
gggggtgactgaatttgaga

SEQ ID NO: 4743 - DNA, 20 bp, Artificial Sequence
  Chr5q_4 Reverse Primer
atcactgaggaagaaccccc

SEQ ID NO: 4744 - DNA, 20 bp, Artificial Sequence
  Chr5q_4 Reverse Primer
gaactttttgtgaggctggc

SEQ ID NO: 4745 - DNA, 20 bp, Artificial Sequence
  Chr5q_4 Reverse Primer
agacacagacactctccgcc

SEQ ID NO: 4746 - DNA, 20 bp, Artificial Sequence
  Chr5q_4 Reverse Primer
cagggagtagggctgaggac

SEQ ID NO: 4747 - DNA, 20 bp, Artificial Sequence
  Chr5q_4 Reverse Primer
tccaggggtcaggatgaata

SEQ ID NO: 4748 - DNA, 20 bp, Artificial Sequence
  Chr5q_4 Reverse Primer
cgtgtgaagcccatcttctt

SEQ ID NO: 4749 - DNA, 21 bp, Artificial Sequence
  Chr5q_4 Reverse Primer
tctcacttttgctaactgccc

SEQ ID NO: 4750 - DNA, 20 bp, Artificial Sequence
  Chr5q_4 Reverse Primer
caatcacccaatcattgcag

SEQ ID NO: 4751 - DNA, 20 bp, Artificial Sequence
  Chr5q_4 Reverse Primer
cagcattctctgagcagcac

SEQ ID NO: 4752 - DNA, 20 bp, Artificial Sequence
  Chr5q_4 Reverse Primer
atccccaaggtttctgatcc

SEQ ID NO: 4753 - DNA, 21 bp, Artificial Sequence
  Chr5q_4 Reverse Primer
aacaagtttgttggcttggtg

SEQ ID NO: 4754 - DNA, 20 bp, Artificial Sequence
  Chr5q_4 Reverse Primer
aattccataccccactgtgc

SEQ ID NO: 4755 - DNA, 21 bp, Artificial Sequence
  Chr5q_4 Reverse Primer
tcttcatttttgtgtctggga

SEQ ID NO: 4756 - DNA, 20 bp, Artificial Sequence
  Chr5q_4 Reverse Primer
ggtggcataatgaactgcct

SEQ ID NO: 4757 - DNA, 27 bp, Artificial Sequence
  Chr5q_4 Reverse Primer
tggggaatattactctaaaacaagaaa

SEQ ID NO: 4758 - DNA, 20 bp, Artificial Sequence
  Chr5q_4 Reverse Primer
gtggtctgggaaaaggactg

SEQ ID NO: 4759 - DNA, 20 bp, Artificial Sequence
  Chr5q_4 Reverse Primer
tggaaacagtcattgcctca

SEQ ID NO: 4760 - DNA, 22 bp, Artificial Sequence
  Chr5q_4 Reverse Primer
tgaaattgccatacatggtagc

SEQ ID NO: 4761 - DNA, 20 bp, Artificial Sequence
  Chr5q_4 Reverse Primer
ctgcatagcctccctcttga

SEQ ID NO: 4762 - DNA, 21 bp, Artificial Sequence
  Chr5q_4 Reverse Primer
ttaagcagatttcacttggca

SEQ ID NO: 4763 - DNA, 20 bp, Artificial Sequence
  Chr5q_4 Reverse Primer
gcaattgccaccacagaata

SEQ ID NO: 4764 - DNA, 20 bp, Artificial Sequence
  Chr5q_4 Reverse Primer
ggacagtgcaggaggtaagc

SEQ ID NO: 4765 - DNA, 20 bp, Artificial Sequence
  Chr5q_4 Reverse Primer
ggcaagaacaaaggaagcag

SEQ ID NO: 4766 - DNA, 20 bp, Artificial Sequence
  Chr5q_4 Reverse Primer
ccaataaagcaggatgtggc

SEQ ID NO: 4767 - DNA, 20 bp, Artificial Sequence
  Chr5q_4 Reverse Primer
ccgaaaaacaaggcaagaag

SEQ ID NO: 4768 - DNA, 20 bp, Artificial Sequence
  Chr5q_4 Reverse Primer
taggaagccaagaggacgaa

SEQ ID NO: 4769 - DNA, 24 bp, Artificial Sequence
  Chr5q_4 Reverse Primer
tctgtcttgatgtcaatgtaatcg

SEQ ID NO: 4770 - DNA, 20 bp, Artificial Sequence
  Chr5q_4 Reverse Primer
tcagataccacgccagtgaa

SEQ ID NO: 4771 - DNA, 22 bp, Artificial Sequence
  Chr5q_4 Reverse Primer
tgggactctagtaccccagaga

SEQ ID NO: 4772 - DNA, 20 bp, Artificial Sequence
  Chr5q_4 Reverse Primer
atgtgcgctgacactttctg

SEQ ID NO: 4773 - DNA, 20 bp, Artificial Sequence
  Chr5q_4 Reverse Primer
ctataagcagtggggaggca

SEQ ID NO: 4774 - DNA, 20 bp, Artificial Sequence
  Chr5q_4 Reverse Primer
ccaaaagcaaggcacaaact

SEQ ID NO: 4775 - DNA, 20 bp, Artificial Sequence
  Chr5q_4 Reverse Primer
cattgtgggaactcctttgc

SEQ ID NO: 4776 - DNA, 20 bp, Artificial Sequence
  Chr5q_4 Reverse Primer
cggaacagtcacctaaaccg

SEQ ID NO: 4777 - DNA, 20 bp, Artificial Sequence
  Chr5q_4 Reverse Primer
tggttgccactgcttcctat

SEQ ID NO: 4778 - DNA, 20 bp, Artificial Sequence
  Chr5q_4 Reverse Primer
ctccagctttctctgcacaa

SEQ ID NO: 4779 - DNA, 20 bp, Artificial Sequence
  Chr5q_4 Reverse Primer
gcatgcaatcctctcctctc

SEQ ID NO: 4780 - DNA, 20 bp, Artificial Sequence
  Chr5q_4 Reverse Primer
tcatcaacttccgctgttgt

SEQ ID NO: 4781 - DNA, 20 bp, Artificial Sequence
  Chr5q_4 Reverse Primer
attggtgtacgcgttgtcag

SEQ ID NO: 4782 - DNA, 20 bp, Artificial Sequence
  Chr5q_4 Reverse Primer
gtgcaggtgtgggagaaact

SEQ ID NO: 4783 - DNA, 20 bp, Artificial Sequence
  Chr5q_4 Reverse Primer
tgaatggaggaaggaaacca

SEQ ID NO: 4784 - DNA, 21 bp, Artificial Sequence
  Chr5q_4 Reverse Primer
tgaccatgcttgacactatgg

SEQ ID NO: 4785 - DNA, 20 bp, Artificial Sequence
  Chr5q_4 Reverse Primer
tccattagttgggttgggaa

SEQ ID NO: 4786 - DNA, 21 bp, Artificial Sequence
  Chr5q_4 Reverse Primer
caaggaccaaagtgtttgtgg

SEQ ID NO: 4787 - DNA, 22 bp, Artificial Sequence
  Chr5q_4 Reverse Primer
tggatactgtgcctaagaccaa

SEQ ID NO: 4788 - DNA, 20 bp, Artificial Sequence
  Chr5q_4 Reverse Primer
cggcctttccaaagtatgaa

SEQ ID NO: 4789 - DNA, 20 bp, Artificial Sequence
  Chr5q_4 Reverse Primer
tgcacagtagcaagggtcag

SEQ ID NO: 4790 - DNA, 22 bp, Artificial Sequence
  Chr5q_4 Reverse Primer
cgtcatgtaaagcagctctctg

SEQ ID NO: 4791 - DNA, 20 bp, Artificial Sequence
  Chr5q_4 Reverse Primer
tgaagaatgggagcaaaagg

SEQ ID NO: 4792 - DNA, 20 bp, Artificial Sequence
  Chr5q_4 Reverse Primer
cctgcttcaggtccaacttt

SEQ ID NO: 4793 - DNA, 20 bp, Artificial Sequence
  Chr5q_4 Reverse Primer
aagcatggcttacatgggac

SEQ ID NO: 4794 - DNA, 20 bp, Artificial Sequence
  Chr5q_4 Reverse Primer
tgcctctgttgacaaagcat

SEQ ID NO: 4795 - DNA, 20 bp, Artificial Sequence
  Chr5q_4 Reverse Primer
cttcactgaggtggaggagc

SEQ ID NO: 4796 - DNA, 20 bp, Artificial Sequence
  Chr5q_4 Reverse Primer
ttgagaatggacacaggggt

SEQ ID NO: 4797 - DNA, 21 bp, Artificial Sequence
  Chr5q_4 Reverse Primer
tgatgaattctcaatggaacc

SEQ ID NO: 4798 - DNA, 20 bp, Artificial Sequence
  Chr5q_4 Reverse Primer
tatccttccatgcctggttc

SEQ ID NO: 4799 - DNA, 20 bp, Artificial Sequence
  Chr5q_4 Reverse Primer
ttggaaaccagttactcccg

SEQ ID NO: 4800 - DNA, 20 bp, Artificial Sequence
  Chr5q_4 Reverse Primer
aggaaccaccacaatctcca

SEQ ID NO: 4801 - DNA, 20 bp, Artificial Sequence
  Chr5q_4 Reverse Primer
ctcccctcctcagaacttcc

SEQ ID NO: 4802 - DNA, 20 bp, Artificial Sequence
  Chr5q_4 Reverse Primer
tggtagtcccagtccgctac

SEQ ID NO: 4803 - DNA, 20 bp, Artificial Sequence
  Chr5q_4 Reverse Primer
aaaaattccctggagatggg

SEQ ID NO: 4804 - DNA, 20 bp, Artificial Sequence
  Chr5q_4 Reverse Primer
ccgtactacagaaggtcgcc

SEQ ID NO: 4805 - DNA, 20 bp, Artificial Sequence
  Chr5q_4 Reverse Primer
tttaggagtgacccacaggc

SEQ ID NO: 4806 - DNA, 20 bp, Artificial Sequence
  Chr5q_4 Reverse Primer
gtcagtcactgtggcttcca

SEQ ID NO: 4807 - DNA, 20 bp, Artificial Sequence
  Chr5q_4 Reverse Primer
agtcccacattgatgggttc

SEQ ID NO: 4808 - DNA, 20 bp, Artificial Sequence
  Chr5q_4 Reverse Primer
ttgctgtcctctctgtccct

SEQ ID NO: 4809 - DNA, 20 bp, Artificial Sequence
  Chr5q_4 Reverse Primer
tctctcaaatggcctccatc

SEQ ID NO: 4810 - DNA, 20 bp, Artificial Sequence
  Chr5q_4 Reverse Primer
ttcattgccttcaaacatgc

SEQ ID NO: 4811 - DNA, 23 bp, Artificial Sequence
  Chr5q_4 Reverse Primer
cagtttcaaatctgctaaatggg

SEQ ID NO: 4812 - DNA, 20 bp, Artificial Sequence
  Chr5q_4 Reverse Primer
aacaacccaccaaaagcaaa

SEQ ID NO: 4813 - DNA, 20 bp, Artificial Sequence
  Chr5q_4 Reverse Primer
cgagggggaaaataagatcc

SEQ ID NO: 4814 - DNA, 20 bp, Artificial Sequence
  Chr5q_4 Reverse Primer
aagtcctgctctcctagggc

SEQ ID NO: 4815 - DNA, 20 bp, Artificial Sequence
  Chr5q_4 Reverse Primer
tagctgaggagccctgagaa

SEQ ID NO: 4816 - DNA, 20 bp, Artificial Sequence
  Chr5q_4 Reverse Primer
aaatgaaccatcaagcccac

SEQ ID NO: 4817 - DNA, 25 bp, Artificial Sequence
  Chr5q_5 Forward Primer
aaatcctgtgtcatttctacttcaa

SEQ ID NO: 4818 - DNA, 27 bp, Artificial Sequence
  Chr5q_5 Forward Primer
tgttcaaaaagtataaaacattggaaa

SEQ ID NO: 4819 - DNA, 20 bp, Artificial Sequence
  Chr5q_5 Forward Primer
gcttctgaattgaagtcccc

SEQ ID NO: 4820 - DNA, 20 bp, Artificial Sequence
  Chr5q_5 Forward Primer
atttggcagagaatgggtga

SEQ ID NO: 4821 - DNA, 20 bp, Artificial Sequence
  Chr5q_5 Forward Primer
cctggaagcgtttgtcattt

SEQ ID NO: 4822 - DNA, 24 bp, Artificial Sequence
  Chr5q_5 Forward Primer
ggaagaatgtaagaaaagaccacc

SEQ ID NO: 4823 - DNA, 20 bp, Artificial Sequence
  Chr5q_5 Forward Primer
accgctgacactgatagcct

SEQ ID NO: 4824 - DNA, 20 bp, Artificial Sequence
  Chr5q_5 Forward Primer
gtacgttttcagtggccaaa

SEQ ID NO: 4825 - DNA, 21 bp, Artificial Sequence
  Chr5q_5 Forward Primer
actttcattctttccaaggca

SEQ ID NO: 4826 - DNA, 22 bp, Artificial Sequence
  Chr5q_5 Forward Primer
cgtcaagagacagatcatgagg

SEQ ID NO: 4827 - DNA, 21 bp, Artificial Sequence
  Chr5q_5 Forward Primer
ttttgggcatcataaatccaa

SEQ ID NO: 4828 - DNA, 21 bp, Artificial Sequence
  Chr5q_5 Forward Primer
acgtaaaggggaaggtcatta

SEQ ID NO: 4829 - DNA, 20 bp, Artificial Sequence
  Chr5q_5 Forward Primer
taatccaaaaggaggcagga

SEQ ID NO: 4830 - DNA, 20 bp, Artificial Sequence
  Chr5q_5 Forward Primer
ccccgatgtcactcaagttt

SEQ ID NO: 4831 - DNA, 21 bp, Artificial Sequence
  Chr5q_5 Forward Primer
acatccattttcaggtgagca

SEQ ID NO: 4832 - DNA, 24 bp, Artificial Sequence
  Chr5q_5 Forward Primer
aagactgtgtagtaacggcaaaga

SEQ ID NO: 4833 - DNA, 20 bp, Artificial Sequence
  Chr5q_5 Forward Primer
cctctgctgtggatagggtc

SEQ ID NO: 4834 - DNA, 24 bp, Artificial Sequence
  Chr5q_5 Forward Primer
tcacacatctgaatgtatggactc

SEQ ID NO: 4835 - DNA, 20 bp, Artificial Sequence
  Chr5q_5 Forward Primer
tccaacatggattttgggat

SEQ ID NO: 4836 - DNA, 20 bp, Artificial Sequence
  Chr5q_5 Forward Primer
ttcccaactccttctgcttt

SEQ ID NO: 4837 - DNA, 21 bp, Artificial Sequence
  Chr5q_5 Forward Primer
catttttgaagcagatgcaga

SEQ ID NO: 4838 - DNA, 20 bp, Artificial Sequence
  Chr5q_5 Forward Primer
tgatcttcaagtccccatcc

SEQ ID NO: 4839 - DNA, 21 bp, Artificial Sequence
  Chr5q_5 Forward Primer
ttttgttatccttgcagcaca

SEQ ID NO: 4840 - DNA, 20 bp, Artificial Sequence
  Chr5q_5 Forward Primer
cagcaatgactaagcagcca

SEQ ID NO: 4841 - DNA, 21 bp, Artificial Sequence
  Chr5q_5 Forward Primer
ttttccatcatcttcacctgc

SEQ ID NO: 4842 - DNA, 22 bp, Artificial Sequence
  Chr5q_5 Forward Primer
tgtgattcaggcaaaagaagaa

SEQ ID NO: 4843 - DNA, 20 bp, Artificial Sequence
  Chr5q_5 Forward Primer
tcagcctccctactggctaa

SEQ ID NO: 4844 - DNA, 21 bp, Artificial Sequence
  Chr5q_5 Forward Primer
gaaggatgctggattgtttga

SEQ ID NO: 4845 - DNA, 20 bp, Artificial Sequence
  Chr5q_5 Forward Primer
agaatggattgagaaggggg

SEQ ID NO: 4846 - DNA, 20 bp, Artificial Sequence
  Chr5q_5 Forward Primer
ccatcctggataggagggtt

SEQ ID NO: 4847 - DNA, 21 bp, Artificial Sequence
  Chr5q_5 Forward Primer
gcaacactaatagcactggca

SEQ ID NO: 4848 - DNA, 20 bp, Artificial Sequence
  Chr5q_5 Forward Primer
gtgctgcgataacccaaaat

SEQ ID NO: 4849 - DNA, 20 bp, Artificial Sequence
  Chr5q_5 Forward Primer
attcaaatgccccagtcaaa

SEQ ID NO: 4850 - DNA, 22 bp, Artificial Sequence
  Chr5q_5 Forward Primer
gcaaatagaatgtccaatggct

SEQ ID NO: 4851 - DNA, 20 bp, Artificial Sequence
  Chr5q_5 Forward Primer
ttcagaaaccatttgggagc

SEQ ID NO: 4852 - DNA, 20 bp, Artificial Sequence
  Chr5q_5 Forward Primer
tgcactgggcaaattagtga

SEQ ID NO: 4853 - DNA, 19 bp, Artificial Sequence
  Chr5q_5 Forward Primer
ggaatgcaagtggcaaaaa

SEQ ID NO: 4854 - DNA, 26 bp, Artificial Sequence
  Chr5q_5 Forward Primer
gctggagaagtacctaagattttaca

SEQ ID NO: 4855 - DNA, 21 bp, Artificial Sequence
  Chr5q_5 Forward Primer
cccaaatcaaattaaagtggc

SEQ ID NO: 4856 - DNA, 21 bp, Artificial Sequence
  Chr5q_5 Forward Primer
tgcagaaagtaaagggcaaaa

SEQ ID NO: 4857 - DNA, 20 bp, Artificial Sequence
  Chr5q_5 Forward Primer
ttagggcaactgaccacaca

SEQ ID NO: 4858 - DNA, 20 bp, Artificial Sequence
  Chr5q_5 Forward Primer
caaaatgcaggatgttccct

SEQ ID NO: 4859 - DNA, 20 bp, Artificial Sequence
  Chr5q_5 Forward Primer
aaaaatcctgcaacccttca

SEQ ID NO: 4860 - DNA, 20 bp, Artificial Sequence
  Chr5q_5 Forward Primer
tttcctcagggcacattttc

SEQ ID NO: 4861 - DNA, 20 bp, Artificial Sequence
  Chr5q_5 Forward Primer
gtttcccctgactcccagat

SEQ ID NO: 4862 - DNA, 21 bp, Artificial Sequence
  Chr5q_5 Forward Primer
gctgattgatatgtgatgccc

SEQ ID NO: 4863 - DNA, 21 bp, Artificial Sequence
  Chr5q_5 Forward Primer
ctgggtgctagctttgttctt

SEQ ID NO: 4864 - DNA, 22 bp, Artificial Sequence
  Chr5q_5 Forward Primer
ttgcaaaactgaaaacagtcaa

SEQ ID NO: 4865 - DNA, 27 bp, Artificial Sequence
  Chr5q_5 Forward Primer
ccagtgactataaaataaactggaagc

SEQ ID NO: 4866 - DNA, 25 bp, Artificial Sequence
  Chr5q_5 Forward Primer
ttgatatgtatactttggggaaaaa

SEQ ID NO: 4867 - DNA, 26 bp, Artificial Sequence
  Chr5q_5 Forward Primer
aaactttatatgggcaaaaatacaca

SEQ ID NO: 4868 - DNA, 19 bp, Artificial Sequence
  Chr5q_5 Forward Primer
tccacatgggaaatcatgg

SEQ ID NO: 4869 - DNA, 20 bp, Artificial Sequence
  Chr5q_5 Forward Primer
gctctttcatcctgggcata

SEQ ID NO: 4870 - DNA, 20 bp, Artificial Sequence
  Chr5q_5 Forward Primer
cattcattgcgcagctctaa

SEQ ID NO: 4871 - DNA, 20 bp, Artificial Sequence
  Chr5q_5 Forward Primer
tcccaataggccatgatgtt

SEQ ID NO: 4872 - DNA, 20 bp, Artificial Sequence
  Chr5q_5 Forward Primer
atgctgacagagggaatgct

SEQ ID NO: 4873 - DNA, 20 bp, Artificial Sequence
  Chr5q_5 Forward Primer
tgttggcagacagtggatca

SEQ ID NO: 4874 - DNA, 20 bp, Artificial Sequence
  Chr5q_5 Forward Primer
cacttccgccttctttcttg

SEQ ID NO: 4875 - DNA, 20 bp, Artificial Sequence
  Chr5q_5 Forward Primer
tcacttgcaatctgggagaa

SEQ ID NO: 4876 - DNA, 24 bp, Artificial Sequence
  Chr5q_5 Forward Primer
ctcttcccaagtaaatgtactccc

SEQ ID NO: 4877 - DNA, 20 bp, Artificial Sequence
  Chr5q_5 Forward Primer
gcagtcacatgcttaggtgc

SEQ ID NO: 4878 - DNA, 20 bp, Artificial Sequence
  Chr5q_5 Forward Primer
ccaccatcattgctctcctt

SEQ ID NO: 4879 - DNA, 20 bp, Artificial Sequence
  Chr5q_5 Forward Primer
gggaaaggaaggagaattgg

SEQ ID NO: 4880 - DNA, 20 bp, Artificial Sequence
  Chr5q_5 Forward Primer
tgagtggaacagctctgtgg

SEQ ID NO: 4881 - DNA, 20 bp, Artificial Sequence
  Chr5q_5 Forward Primer
tctctacgcctttgcttgtg

SEQ ID NO: 4882 - DNA, 21 bp, Artificial Sequence
  Chr5q_5 Forward Primer
tcctccaatccaaacagtgtc

SEQ ID NO: 4883 - DNA, 23 bp, Artificial Sequence
  Chr5q_5 Forward Primer
ccacatcatctatctgtcattgc

SEQ ID NO: 4884 - DNA, 25 bp, Artificial Sequence
  Chr5q_5 Forward Primer
ctttaacatgactttcaatgagcaa

SEQ ID NO: 4885 - DNA, 21 bp, Artificial Sequence
  Chr5q_5 Forward Primer
tgcattgtcctatattccgag

SEQ ID NO: 4886 - DNA, 20 bp, Artificial Sequence
  Chr5q_5 Forward Primer
tcacgtttctttgtgtccca

SEQ ID NO: 4887 - DNA, 20 bp, Artificial Sequence
  Chr5q_5 Forward Primer
tgagcacaatgcctcctaca

SEQ ID NO: 4888 - DNA, 20 bp, Artificial Sequence
  Chr5q_5 Forward Primer
tgccagaacctactcttcgg

SEQ ID NO: 4889 - DNA, 21 bp, Artificial Sequence
  Chr5q_5 Forward Primer
tgagagtgattctgccacagt

SEQ ID NO: 4890 - DNA, 21 bp, Artificial Sequence
  Chr5q_5 Forward Primer
tttcagggcttttgtctacca

SEQ ID NO: 4891 - DNA, 21 bp, Artificial Sequence
  Chr5q_5 Forward Primer
ccttcaattccttgaaatgcc

SEQ ID NO: 4892 - DNA, 20 bp, Artificial Sequence
  Chr5q_5 Forward Primer
cacagtgaccttttcccgtt

SEQ ID NO: 4893 - DNA, 22 bp, Artificial Sequence
  Chr5q_5 Forward Primer
aacctcctccattcattttcaa

SEQ ID NO: 4894 - DNA, 23 bp, Artificial Sequence
  Chr5q_5 Forward Primer
tgggtgagaaagagagagaaaga

SEQ ID NO: 4895 - DNA, 20 bp, Artificial Sequence
  Chr5q_5 Forward Primer
aatgatgcttcgtttccacc

SEQ ID NO: 4896 - DNA, 20 bp, Artificial Sequence
  Chr5q_5 Forward Primer
catcaacatggggaaaggtt

SEQ ID NO: 4897 - DNA, 20 bp, Artificial Sequence
  Chr5q_5 Forward Primer
aactgagcattgtccaaggg

SEQ ID NO: 4898 - DNA, 20 bp, Artificial Sequence
  Chr5q_5 Forward Primer
tgcaccaattagcacctttg

SEQ ID NO: 4899 - DNA, 21 bp, Artificial Sequence
  Chr5q_5 Forward Primer
tccgtaatgtgaggattggag

SEQ ID NO: 4900 - DNA, 20 bp, Artificial Sequence
  Chr5q_5 Forward Primer
aagagtcaagtagcggccaa

SEQ ID NO: 4901 - DNA, 20 bp, Artificial Sequence
  Chr5q_5 Forward Primer
ttctctgtactgcttccgca

SEQ ID NO: 4902 - DNA, 20 bp, Artificial Sequence
  Chr5q_5 Forward Primer
ctggtgggtgttggagttct

SEQ ID NO: 4903 - DNA, 21 bp, Artificial Sequence
  Chr5q_5 Forward Primer
tgaggcttggagagttgaaga

SEQ ID NO: 4904 - DNA, 20 bp, Artificial Sequence
  Chr5q_5 Forward Primer
atgagcagacaggaatggct

SEQ ID NO: 4905 - DNA, 21 bp, Artificial Sequence
  Chr5q_5 Forward Primer
cagatgactccctggtttcaa

SEQ ID NO: 4906 - DNA, 23 bp, Artificial Sequence
  Chr5q_5 Forward Primer
gccaagaaacattgttagaatca

SEQ ID NO: 4907 - DNA, 20 bp, Artificial Sequence
  Chr5q_5 Forward Primer
gctagattccagggactggg

SEQ ID NO: 4908 - DNA, 22 bp, Artificial Sequence
  Chr5q_5 Forward Primer
tttcctttgtgcattctttacg

SEQ ID NO: 4909 - DNA, 20 bp, Artificial Sequence
  Chr5q_5 Forward Primer
tgcccactgaaagaagaatg

SEQ ID NO: 4910 - DNA, 21 bp, Artificial Sequence
  Chr5q_5 Forward Primer
gcaggtactttcggattttca

SEQ ID NO: 4911 - DNA, 20 bp, Artificial Sequence
  Chr5q_5 Forward Primer
tccacagggacaacttttga

SEQ ID NO: 4912 - DNA, 22 bp, Artificial Sequence
  Chr5q_5 Forward Primer
ttgcctagtcagatgaggactg

SEQ ID NO: 4913 - DNA, 20 bp, Artificial Sequence
  Chr5q_5 Reverse Primer
atgcatgctcagagcctttc

SEQ ID NO: 4914 - DNA, 26 bp, Artificial Sequence
  Chr5q_5 Reverse Primer
ttttacatacccacatatgcaaagta

SEQ ID NO: 4915 - DNA, 24 bp, Artificial Sequence
  Chr5q_5 Reverse Primer
ttgatttggttttgttttgttgtt

SEQ ID NO: 4916 - DNA, 20 bp, Artificial Sequence
  Chr5q_5 Reverse Primer
tcttttgctttgctcccact

SEQ ID NO: 4917 - DNA, 20 bp, Artificial Sequence
  Chr5q_5 Reverse Primer
ggtgaagccagggattttct

SEQ ID NO: 4918 - DNA, 20 bp, Artificial Sequence
  Chr5q_5 Reverse Primer
tttgggatttgttactggca

SEQ ID NO: 4919 - DNA, 20 bp, Artificial Sequence
  Chr5q_5 Reverse Primer
tgggtctgttctggtttggt

SEQ ID NO: 4920 - DNA, 20 bp, Artificial Sequence
  Chr5q_5 Reverse Primer
gaagcagatgaaatggcaca

SEQ ID NO: 4921 - DNA, 20 bp, Artificial Sequence
  Chr5q_5 Reverse Primer
ttccaaaatgtgtttggcct

SEQ ID NO: 4922 - DNA, 21 bp, Artificial Sequence
  Chr5q_5 Reverse Primer
tgagagatagaatcagctggc

SEQ ID NO: 4923 - DNA, 20 bp, Artificial Sequence
  Chr5q_5 Reverse Primer
tggtcatttttgttggctga

SEQ ID NO: 4924 - DNA, 23 bp, Artificial Sequence
  Chr5q_5 Reverse Primer
acttcaactaccatacctccctc

SEQ ID NO: 4925 - DNA, 21 bp, Artificial Sequence
  Chr5q_5 Reverse Primer
tttgtaggcatcacaaagctg

SEQ ID NO: 4926 - DNA, 20 bp, Artificial Sequence
  Chr5q_5 Reverse Primer
aaggacaccccatgcagata

SEQ ID NO: 4927 - DNA, 20 bp, Artificial Sequence
  Chr5q_5 Reverse Primer
acaacacgttttctttgggc

SEQ ID NO: 4928 - DNA, 20 bp, Artificial Sequence
  Chr5q_5 Reverse Primer
atggatgacccattgttcca

SEQ ID NO: 4929 - DNA, 20 bp, Artificial Sequence
  Chr5q_5 Reverse Primer
tacttcccttggcaggaatg

SEQ ID NO: 4930 - DNA, 21 bp, Artificial Sequence
  Chr5q_5 Reverse Primer
cattctgccctcatttttcaa

SEQ ID NO: 4931 - DNA, 23 bp, Artificial Sequence
  Chr5q_5 Reverse Primer
catttcaaaccaatttaatgctg

SEQ ID NO: 4932 - DNA, 20 bp, Artificial Sequence
  Chr5q_5 Reverse Primer
ccgtgccacacaaaaataag

SEQ ID NO: 4933 - DNA, 20 bp, Artificial Sequence
  Chr5q_5 Reverse Primer
ttggtcccgtaagccaaata

SEQ ID NO: 4934 - DNA, 20 bp, Artificial Sequence
  Chr5q_5 Reverse Primer
tttgtggccggaaataaaac

SEQ ID NO: 4935 - DNA, 20 bp, Artificial Sequence
  Chr5q_5 Reverse Primer
aaatccacttgagaggacgg

SEQ ID NO: 4936 - DNA, 20 bp, Artificial Sequence
  Chr5q_5 Reverse Primer
ttgaaatgcccaaccattct

SEQ ID NO: 4937 - DNA, 22 bp, Artificial Sequence
  Chr5q_5 Reverse Primer
taagcagtccaatccatgaaga

SEQ ID NO: 4938 - DNA, 20 bp, Artificial Sequence
  Chr5q_5 Reverse Primer
atccccagctaaaaattggg

SEQ ID NO: 4939 - DNA, 20 bp, Artificial Sequence
  Chr5q_5 Reverse Primer
attcctcaggttttgccctt

SEQ ID NO: 4940 - DNA, 20 bp, Artificial Sequence
  Chr5q_5 Reverse Primer
caactcagtgcttgcccata

SEQ ID NO: 4941 - DNA, 20 bp, Artificial Sequence
  Chr5q_5 Reverse Primer
ttctccaccacacagtggaa

SEQ ID NO: 4942 - DNA, 20 bp, Artificial Sequence
  Chr5q_5 Reverse Primer
gtccccagaatgttttgcat

SEQ ID NO: 4943 - DNA, 20 bp, Artificial Sequence
  Chr5q_5 Reverse Primer
ttgctttaaccccagaggaa

SEQ ID NO: 4944 - DNA, 20 bp, Artificial Sequence
  Chr5q_5 Reverse Primer
agcccaaggttaaaatcacg

SEQ ID NO: 4945 - DNA, 20 bp, Artificial Sequence
  Chr5q_5 Reverse Primer
gaggcagaaaggagtagcca

SEQ ID NO: 4946 - DNA, 20 bp, Artificial Sequence
  Chr5q_5 Reverse Primer
cctgtctttggatccctctg

SEQ ID NO: 4947 - DNA, 20 bp, Artificial Sequence
  Chr5q_5 Reverse Primer
acatgcatgcacacacacac

SEQ ID NO: 4948 - DNA, 20 bp, Artificial Sequence
  Chr5q_5 Reverse Primer
tttttcaggtttgccttgtt

SEQ ID NO: 4949 - DNA, 21 bp, Artificial Sequence
  Chr5q_5 Reverse Primer
tggcattactgcacagaaaaa

SEQ ID NO: 4950 - DNA, 20 bp, Artificial Sequence
  Chr5q_5 Reverse Primer
tttctcagctcacatccctg

SEQ ID NO: 4951 - DNA, 20 bp, Artificial Sequence
  Chr5q_5 Reverse Primer
gccgtaaggtaaggtctccc

SEQ ID NO: 4952 - DNA, 22 bp, Artificial Sequence
  Chr5q_5 Reverse Primer
ccctaggtggtgtcatttttct

SEQ ID NO: 4953 - DNA, 20 bp, Artificial Sequence
  Chr5q_5 Reverse Primer
ttccaggtgcaaacacaaaa

SEQ ID NO: 4954 - DNA, 20 bp, Artificial Sequence
  Chr5q_5 Reverse Primer
ctgccaagggactctttttg

SEQ ID NO: 4955 - DNA, 20 bp, Artificial Sequence
  Chr5q_5 Reverse Primer
tatttgcccctttgtcttgc

SEQ ID NO: 4956 - DNA, 20 bp, Artificial Sequence
  Chr5q_5 Reverse Primer
ttgcataggcaaagatgctg

SEQ ID NO: 4957 - DNA, 20 bp, Artificial Sequence
  Chr5q_5 Reverse Primer
ggagtccactggatgaggaa

SEQ ID NO: 4958 - DNA, 20 bp, Artificial Sequence
  Chr5q_5 Reverse Primer
cctttggggttaggggttta

SEQ ID NO: 4959 - DNA, 21 bp, Artificial Sequence
  Chr5q_5 Reverse Primer
ccccagatcaataaatgaccc

SEQ ID NO: 4960 - DNA, 20 bp, Artificial Sequence
  Chr5q_5 Reverse Primer
gctgattcctggagtctgga

SEQ ID NO: 4961 - DNA, 24 bp, Artificial Sequence
  Chr5q_5 Reverse Primer
atgtacctcactttatcaatgcac

SEQ ID NO: 4962 - DNA, 24 bp, Artificial Sequence
  Chr5q_5 Reverse Primer
tggaatgtatatttggaacagtga

SEQ ID NO: 4963 - DNA, 20 bp, Artificial Sequence
  Chr5q_5 Reverse Primer
tggaatgcgcagtaagttga

SEQ ID NO: 4964 - DNA, 21 bp, Artificial Sequence
  Chr5q_5 Reverse Primer
ggtccctaatgctattgttgc

SEQ ID NO: 4965 - DNA, 20 bp, Artificial Sequence
  Chr5q_5 Reverse Primer
ttggatggttctggaaaagc

SEQ ID NO: 4966 - DNA, 21 bp, Artificial Sequence
  Chr5q_5 Reverse Primer
ccctaatgttgacttcctcca

SEQ ID NO: 4967 - DNA, 20 bp, Artificial Sequence
  Chr5q_5 Reverse Primer
tgcaaagggacagaatgatg

SEQ ID NO: 4968 - DNA, 20 bp, Artificial Sequence
  Chr5q_5 Reverse Primer
atacggggcaatgctatttg

SEQ ID NO: 4969 - DNA, 20 bp, Artificial Sequence
  Chr5q_5 Reverse Primer
gtcagataccatcctcccca

SEQ ID NO: 4970 - DNA, 20 bp, Artificial Sequence
  Chr5q_5 Reverse Primer
ccagggaaagcaaaatgtgt

SEQ ID NO: 4971 - DNA, 20 bp, Artificial Sequence
  Chr5q_5 Reverse Primer
ccccagcacagaaaactctc

SEQ ID NO: 4972 - DNA, 20 bp, Artificial Sequence
  Chr5q_5 Reverse Primer
ttttgcttttcaacatggca

SEQ ID NO: 4973 - DNA, 20 bp, Artificial Sequence
  Chr5q_5 Reverse Primer
caatgagcacacattccagc

SEQ ID NO: 4974 - DNA, 20 bp, Artificial Sequence
  Chr5q_5 Reverse Primer
tacctgcttccagagcacct

SEQ ID NO: 4975 - DNA, 20 bp, Artificial Sequence
  Chr5q_5 Reverse Primer
ctttggaatctgccctggta

SEQ ID NO: 4976 - DNA, 22 bp, Artificial Sequence
  Chr5q_5 Reverse Primer
tggatgggaaaatgagtagagg

SEQ ID NO: 4977 - DNA, 20 bp, Artificial Sequence
  Chr5q_5 Reverse Primer
cattttgagcaaaagtgcca

SEQ ID NO: 4978 - DNA, 25 bp, Artificial Sequence
  Chr5q_5 Reverse Primer
cagtgaaatgttgatagctaaaagg

SEQ ID NO: 4979 - DNA, 22 bp, Artificial Sequence
  Chr5q_5 Reverse Primer
agctatttgttggaaaaggaaa

SEQ ID NO: 4980 - DNA, 25 bp, Artificial Sequence
  Chr5q_5 Reverse Primer
accttattttattttggttgtgctg

SEQ ID NO: 4981 - DNA, 22 bp, Artificial Sequence
  Chr5q_5 Reverse Primer
ggcaatggaaattaaaacactc

SEQ ID NO: 4982 - DNA, 20 bp, Artificial Sequence
  Chr5q_5 Reverse Primer
caaccatccttttcctggag

SEQ ID NO: 4983 - DNA, 20 bp, Artificial Sequence
  Chr5q_5 Reverse Primer
ccatggtaggcagtttccaa

SEQ ID NO: 4984 - DNA, 20 bp, Artificial Sequence
  Chr5q_5 Reverse Primer
agcctccgatgtcccatatt

SEQ ID NO: 4985 - DNA, 20 bp, Artificial Sequence
  Chr5q_5 Reverse Primer
aaagaagccacaggaaaggg

SEQ ID NO: 4986 - DNA, 20 bp, Artificial Sequence
  Chr5q_5 Reverse Primer
tttcttccttctctggagcg

SEQ ID NO: 4987 - DNA, 20 bp, Artificial Sequence
  Chr5q_5 Reverse Primer
ttggaaaggtgggcagttag

SEQ ID NO: 4988 - DNA, 20 bp, Artificial Sequence
  Chr5q_5 Reverse Primer
aggtggtgagaccattcctg

SEQ ID NO: 4989 - DNA, 20 bp, Artificial Sequence
  Chr5q_5 Reverse Primer
cacgtttgagtggcatgttc

SEQ ID NO: 4990 - DNA, 24 bp, Artificial Sequence
  Chr5q_5 Reverse Primer
ccacagaagacatttttagttccc

SEQ ID NO: 4991 - DNA, 21 bp, Artificial Sequence
  Chr5q_5 Reverse Primer
tgcattatgttttccgtgtca

SEQ ID NO: 4992 - DNA, 22 bp, Artificial Sequence
  Chr5q_5 Reverse Primer
tccttgactggaattaggatgg

SEQ ID NO: 4993 - DNA, 20 bp, Artificial Sequence
  Chr5q_5 Reverse Primer
agtagaaaaatgggagcgca

SEQ ID NO: 4994 - DNA, 20 bp, Artificial Sequence
  Chr5q_5 Reverse Primer
gtggggaacccttgtcacta

SEQ ID NO: 4995 - DNA, 20 bp, Artificial Sequence
  Chr5q_5 Reverse Primer
aatcactgaggatagggcca

SEQ ID NO: 4996 - DNA, 20 bp, Artificial Sequence
  Chr5q_5 Reverse Primer
tttaggtcggatcctgatgg

SEQ ID NO: 4997 - DNA, 21 bp, Artificial Sequence
  Chr5q_5 Reverse Primer
tcatcccttaaacacttggga

SEQ ID NO: 4998 - DNA, 22 bp, Artificial Sequence
  Chr5q_5 Reverse Primer
tgaccaccattttaatcaaagc

SEQ ID NO: 4999 - DNA, 23 bp, Artificial Sequence
  Chr5q_5 Reverse Primer
cactcagaaatgcactatggaaa

SEQ ID NO: 5000 - DNA, 20 bp, Artificial Sequence
  Chr5q_5 Reverse Primer
ttccctctcacttccctcct

SEQ ID NO: 5001 - DNA, 19 bp, Artificial Sequence
  Chr5q_5 Reverse Primer
atctgcacatcacctgcgt

SEQ ID NO: 5002 - DNA, 27 bp, Artificial Sequence
  Chr5q_5 Reverse Primer
acactttattatccactcaagattttt

SEQ ID NO: 5003 - DNA, 23 bp, Artificial Sequence
  Chr5q_5 Reverse Primer
gccagaaaacgtagattaaagca

SEQ ID NO: 5004 - DNA, 20 bp, Artificial Sequence
  Chr5q_5 Reverse Primer
cagctgggtcacagcatagt

SEQ ID NO: 5005 - DNA, 27 bp, Artificial Sequence
  Chr5q_5 Reverse Primer
tctcgtaataaatagggtaaacacaaa

SEQ ID NO: 5006 - DNA, 24 bp, Artificial Sequence
  Chr5q_5 Reverse Primer
ccattgtctcataatgtaggttgc

SEQ ID NO: 5007 - DNA, 22 bp, Artificial Sequence
  Chr5q_5 Reverse Primer
tcatttctgccttagggaagtt

SEQ ID NO: 5008 - DNA, 20 bp, Artificial Sequence
  Chr5q_5 Reverse Primer
attttatgggtggcaagctg

SEQ ID NO: 5009 - DNA, 24 bp, Artificial Sequence
  Chr5q_6 Forward Primer
ggaatcattcatgtgtcagttttc

SEQ ID NO: 5010 - DNA, 23 bp, Artificial Sequence
  Chr5q_6 Forward Primer
tcaaccaactaaagtgatgatgc

SEQ ID NO: 5011 - DNA, 20 bp, Artificial Sequence
  Chr5q_6 Forward Primer
tgaaaacagcagggaaattg

SEQ ID NO: 5012 - DNA, 21 bp, Artificial Sequence
  Chr5q_6 Forward Primer
gcctttagaagtgatggcaaa

SEQ ID NO: 5013 - DNA, 20 bp, Artificial Sequence
  Chr5q_6 Forward Primer
acccacatttgttgaaagca

SEQ ID NO: 5014 - DNA, 22 bp, Artificial Sequence
  Chr5q_6 Forward Primer
aaattccctggagtatgcttct

SEQ ID NO: 5015 - DNA, 22 bp, Artificial Sequence
  Chr5q_6 Forward Primer
ttgaagaagacatctgccacac

SEQ ID NO: 5016 - DNA, 20 bp, Artificial Sequence
  Chr5q_6 Forward Primer
atgaagatgaagagctgccc

SEQ ID NO: 5017 - DNA, 21 bp, Artificial Sequence
  Chr5q_6 Forward Primer
tggaggacgaatctaaaggtg

SEQ ID NO: 5018 - DNA, 21 bp, Artificial Sequence
  Chr5q_6 Forward Primer
ccagctatgaaaatggtaggc

SEQ ID NO: 5019 - DNA, 20 bp, Artificial Sequence
  Chr5q_6 Forward Primer
tcacttcagaagacccatcg

SEQ ID NO: 5020 - DNA, 26 bp, Artificial Sequence
  Chr5q_6 Forward Primer
gagatcactttcatttgtattgtttt

SEQ ID NO: 5021 - DNA, 26 bp, Artificial Sequence
  Chr5q_6 Forward Primer
ttactcttctatgtttctttagcagc

SEQ ID NO: 5022 - DNA, 20 bp, Artificial Sequence
  Chr5q_6 Forward Primer
caaatccacagaatggcaga

SEQ ID NO: 5023 - DNA, 20 bp, Artificial Sequence
  Chr5q_6 Forward Primer
tttcaacagtgctttgtgcc

SEQ ID NO: 5024 - DNA, 19 bp, Artificial Sequence
  Chr5q_6 Forward Primer
ggcagctgcagtgaggtaa

SEQ ID NO: 5025 - DNA, 20 bp, Artificial Sequence
  Chr5q_6 Forward Primer
ggcaaggaaccaaaagcata

SEQ ID NO: 5026 - DNA, 21 bp, Artificial Sequence
  Chr5q_6 Forward Primer
tgcaagttattgaaacagggg

SEQ ID NO: 5027 - DNA, 20 bp, Artificial Sequence
  Chr5q_6 Forward Primer
gagttaatacggcctcctgc

SEQ ID NO: 5028 - DNA, 19 bp, Artificial Sequence
  Chr5q_6 Forward Primer
cttggggtgctgaaggact

SEQ ID NO: 5029 - DNA, 21 bp, Artificial Sequence
  Chr5q_6 Forward Primer
cttcagaaatcagcctccaaa

SEQ ID NO: 5030 - DNA, 20 bp, Artificial Sequence
  Chr5q_6 Forward Primer
atatccctgccaatgctttc

SEQ ID NO: 5031 - DNA, 20 bp, Artificial Sequence
  Chr5q_6 Forward Primer
ctttacctcccattcccgtt

SEQ ID NO: 5032 - DNA, 23 bp, Artificial Sequence
  Chr5q_6 Forward Primer
ttcaaatgtttcgatgtatctgc

SEQ ID NO: 5033 - DNA, 21 bp, Artificial Sequence
  Chr5q_6 Forward Primer
tgtggcttattcatcatgtgc

SEQ ID NO: 5034 - DNA, 20 bp, Artificial Sequence
  Chr5q_6 Forward Primer
aacaagatgggcacttccat

SEQ ID NO: 5035 - DNA, 20 bp, Artificial Sequence
  Chr5q_6 Forward Primer
tgatggctacaccccagagt

SEQ ID NO: 5036 - DNA, 20 bp, Artificial Sequence
  Chr5q_6 Forward Primer
ttttgacatgctcagccatc

SEQ ID NO: 5037 - DNA, 21 bp, Artificial Sequence
  Chr5q_6 Forward Primer
tgacttcatttctccaaccca

SEQ ID NO: 5038 - DNA, 20 bp, Artificial Sequence
  Chr5q_6 Forward Primer
catccccacctagaaagctg

SEQ ID NO: 5039 - DNA, 20 bp, Artificial Sequence
  Chr5q_6 Forward Primer
ccctatcacagcccaaccta

SEQ ID NO: 5040 - DNA, 20 bp, Artificial Sequence
  Chr5q_6 Forward Primer
ttgcatgggagaatatgggt

SEQ ID NO: 5041 - DNA, 20 bp, Artificial Sequence
  Chr5q_6 Forward Primer
cgtttgccaggtttaccact

SEQ ID NO: 5042 - DNA, 20 bp, Artificial Sequence
  Chr5q_6 Forward Primer
cgtagagctttgggaaacca

SEQ ID NO: 5043 - DNA, 22 bp, Artificial Sequence
  Chr5q_6 Forward Primer
tgtcaacagaaggcctaattga

SEQ ID NO: 5044 - DNA, 20 bp, Artificial Sequence
  Chr5q_6 Forward Primer
atcaaggcttccccgtaaat

SEQ ID NO: 5045 - DNA, 26 bp, Artificial Sequence
  Chr5q_6 Forward Primer
tcatgctttctttaacttatttgcat

SEQ ID NO: 5046 - DNA, 20 bp, Artificial Sequence
  Chr5q_6 Forward Primer
ggtctccaacagggaacaaa

SEQ ID NO: 5047 - DNA, 20 bp, Artificial Sequence
  Chr5q_6 Forward Primer
cctttgagctgcctttgttc

SEQ ID NO: 5048 - DNA, 20 bp, Artificial Sequence
  Chr5q_6 Forward Primer
gactcttctgccagattcgg

SEQ ID NO: 5049 - DNA, 23 bp, Artificial Sequence
  Chr5q_6 Forward Primer
tgaaatcttttacttcccaacca

SEQ ID NO: 5050 - DNA, 21 bp, Artificial Sequence
  Chr5q_6 Forward Primer
caagaagagaaaatgccacca

SEQ ID NO: 5051 - DNA, 20 bp, Artificial Sequence
  Chr5q_6 Forward Primer
ttttgaaatacggcagtggc

SEQ ID NO: 5052 - DNA, 20 bp, Artificial Sequence
  Chr5q_6 Forward Primer
ccctgacagagttcccaatg

SEQ ID NO: 5053 - DNA, 20 bp, Artificial Sequence
  Chr5q_6 Forward Primer
gccagctcctcacttgagtc

SEQ ID NO: 5054 - DNA, 24 bp, Artificial Sequence
  Chr5q_6 Forward Primer
aaatgcgaagacacagtatgtagc

SEQ ID NO: 5055 - DNA, 20 bp, Artificial Sequence
  Chr5q_6 Forward Primer
ttcaacaattacttccgccc

SEQ ID NO: 5056 - DNA, 20 bp, Artificial Sequence
  Chr5q_6 Forward Primer
gcgactgaggcttctattgg

SEQ ID NO: 5057 - DNA, 20 bp, Artificial Sequence
  Chr5q_6 Forward Primer
ttccgtaaaagtcctgggtg

SEQ ID NO: 5058 - DNA, 24 bp, Artificial Sequence
  Chr5q_6 Forward Primer
tttgtttgttttgttttgtttttg

SEQ ID NO: 5059 - DNA, 20 bp, Artificial Sequence
  Chr5q_6 Forward Primer
aggttagttcctgcctgcaa

SEQ ID NO: 5060 - DNA, 20 bp, Artificial Sequence
  Chr5q_6 Forward Primer
caggaacccaaacactttga

SEQ ID NO: 5061 - DNA, 20 bp, Artificial Sequence
  Chr5q_6 Forward Primer
acgtttcacagcttctgcct

SEQ ID NO: 5062 - DNA, 20 bp, Artificial Sequence
  Chr5q_6 Forward Primer
tcctagggaccatgtgcttc

SEQ ID NO: 5063 - DNA, 20 bp, Artificial Sequence
  Chr5q_6 Forward Primer
agtgcccaccaattgtcagt

SEQ ID NO: 5064 - DNA, 21 bp, Artificial Sequence
  Chr5q_6 Forward Primer
aatgcatacactgcccaactt

SEQ ID NO: 5065 - DNA, 20 bp, Artificial Sequence
  Chr5q_6 Forward Primer
tctaggttaggatgcccagc

SEQ ID NO: 5066 - DNA, 22 bp, Artificial Sequence
  Chr5q_6 Forward Primer
ttctgccatgttttaccagaaa

SEQ ID NO: 5067 - DNA, 21 bp, Artificial Sequence
  Chr5q_6 Forward Primer
ggatccatctgatttgacagc

SEQ ID NO: 5068 - DNA, 25 bp, Artificial Sequence
  Chr5q_6 Forward Primer
tggctatttcattcaacaactaaca

SEQ ID NO: 5069 - DNA, 20 bp, Artificial Sequence
  Chr5q_6 Forward Primer
aaaagcactgcaccatcaaa

SEQ ID NO: 5070 - DNA, 20 bp, Artificial Sequence
  Chr5q_6 Forward Primer
agcctcatggctagtggcta

SEQ ID NO: 5071 - DNA, 21 bp, Artificial Sequence
  Chr5q_6 Forward Primer
tggcttgaaaagttcacatca

SEQ ID NO: 5072 - DNA, 21 bp, Artificial Sequence
  Chr5q_6 Forward Primer
tcattgcatgactttgtgcat

SEQ ID NO: 5073 - DNA, 21 bp, Artificial Sequence
  Chr5q_6 Forward Primer
ttctatttgggcgaataggct

SEQ ID NO: 5074 - DNA, 20 bp, Artificial Sequence
  Chr5q_6 Forward Primer
tcccagggcatgtgattaaa

SEQ ID NO: 5075 - DNA, 20 bp, Artificial Sequence
  Chr5q_6 Forward Primer
tacccatcatgcattttgct

SEQ ID NO: 5076 - DNA, 20 bp, Artificial Sequence
  Chr5q_6 Forward Primer
acccctttgaagttcccagt

SEQ ID NO: 5077 - DNA, 21 bp, Artificial Sequence
  Chr5q_6 Forward Primer
ttcgaaaaatatggctgattg

SEQ ID NO: 5078 - DNA, 20 bp, Artificial Sequence
  Chr5q_6 Forward Primer
ccaaccacaaagactcagca

SEQ ID NO: 5079 - DNA, 20 bp, Artificial Sequence
  Chr5q_6 Forward Primer
cagaaacgaatggttcaccc

SEQ ID NO: 5080 - DNA, 20 bp, Artificial Sequence
  Chr5q_6 Forward Primer
tgcccaatacccagtacctt

SEQ ID NO: 5081 - DNA, 24 bp, Artificial Sequence
  Chr5q_6 Forward Primer
tcaaaagcactatcttctctttgc

SEQ ID NO: 5082 - DNA, 20 bp, Artificial Sequence
  Chr5q_6 Forward Primer
tttgcctgtgtttttgttgg

SEQ ID NO: 5083 - DNA, 20 bp, Artificial Sequence
  Chr5q_6 Forward Primer
tcctcatcaaagctgctgaa

SEQ ID NO: 5084 - DNA, 20 bp, Artificial Sequence
  Chr5q_6 Forward Primer
aaagctagcactgacccagg

SEQ ID NO: 5085 - DNA, 20 bp, Artificial Sequence
  Chr5q_6 Forward Primer
accccaaagtgaatgtgacc

SEQ ID NO: 5086 - DNA, 22 bp, Artificial Sequence
  Chr5q_6 Forward Primer
ctctcttttgtggtttgtgcat

SEQ ID NO: 5087 - DNA, 22 bp, Artificial Sequence
  Chr5q_6 Forward Primer
tcttcaaaggcattttatgcaa

SEQ ID NO: 5088 - DNA, 20 bp, Artificial Sequence
  Chr5q_6 Forward Primer
tgccaaaggaaactgttcaa

SEQ ID NO: 5089 - DNA, 24 bp, Artificial Sequence
  Chr5q_6 Forward Primer
ttaatggatgcacctattcttaaa

SEQ ID NO: 5090 - DNA, 21 bp, Artificial Sequence
  Chr5q_6 Forward Primer
tgctgtgtataaggaggtggg

SEQ ID NO: 5091 - DNA, 20 bp, Artificial Sequence
  Chr5q_6 Forward Primer
agctaatctgttcgggcact

SEQ ID NO: 5092 - DNA, 20 bp, Artificial Sequence
  Chr5q_6 Forward Primer
aggtcctccaaagaacccaa

SEQ ID NO: 5093 - DNA, 20 bp, Artificial Sequence
  Chr5q_6 Forward Primer
accattcgcagaaataacca

SEQ ID NO: 5094 - DNA, 20 bp, Artificial Sequence
  Chr5q_6 Forward Primer
agatgccttattttggccct

SEQ ID NO: 5095 - DNA, 26 bp, Artificial Sequence
  Chr5q_6 Forward Primer
tctttttcacattttcctaagtatgg

SEQ ID NO: 5096 - DNA, 22 bp, Artificial Sequence
  Chr5q_6 Forward Primer
gaagcctggaaagagaaacaaa

SEQ ID NO: 5097 - DNA, 21 bp, Artificial Sequence
  Chr5q_6 Forward Primer
ccggatttatcatttctggct

SEQ ID NO: 5098 - DNA, 22 bp, Artificial Sequence
  Chr5q_6 Forward Primer
tcaagttatccctctcggtagc

SEQ ID NO: 5099 - DNA, 20 bp, Artificial Sequence
  Chr5q_6 Forward Primer
ttaagcagcacctagcatgg

SEQ ID NO: 5100 - DNA, 21 bp, Artificial Sequence
  Chr5q_6 Forward Primer
tgtcaggaaaagctccaaaga

SEQ ID NO: 5101 - DNA, 20 bp, Artificial Sequence
  Chr5q_6 Forward Primer
aggccttgtaaattcccaca

SEQ ID NO: 5102 - DNA, 23 bp, Artificial Sequence
  Chr5q_6 Forward Primer
tgataaccagaaaaacctcagga

SEQ ID NO: 5103 - DNA, 20 bp, Artificial Sequence
  Chr5q_6 Forward Primer
tgccattctcagaacactgg

SEQ ID NO: 5104 - DNA, 20 bp, Artificial Sequence
  Chr5q_6 Forward Primer
attcacacccacatgactgg

SEQ ID NO: 5105 - DNA, 20 bp, Artificial Sequence
  Chr5q_6 Reverse Primer
gactgctctgaaccaccacc

SEQ ID NO: 5106 - DNA, 21 bp, Artificial Sequence
  Chr5q_6 Reverse Primer
cacttcactcttcatcctcca

SEQ ID NO: 5107 - DNA, 23 bp, Artificial Sequence
  Chr5q_6 Reverse Primer
tggtccaatttttaacttgttgc

SEQ ID NO: 5108 - DNA, 21 bp, Artificial Sequence
  Chr5q_6 Reverse Primer
gaaccacaaatccttcagtgg

SEQ ID NO: 5109 - DNA, 20 bp, Artificial Sequence
  Chr5q_6 Reverse Primer
ggatggcatgtcgttacctc

SEQ ID NO: 5110 - DNA, 22 bp, Artificial Sequence
  Chr5q_6 Reverse Primer
gcaatgtcatttcctttgaaga

SEQ ID NO: 5111 - DNA, 20 bp, Artificial Sequence
  Chr5q_6 Reverse Primer
agggctctgcatgtcacttt

SEQ ID NO: 5112 - DNA, 22 bp, Artificial Sequence
  Chr5q_6 Reverse Primer
gggtgactttgtggtaagagaa

SEQ ID NO: 5113 - DNA, 20 bp, Artificial Sequence
  Chr5q_6 Reverse Primer
ctcatgcattcctctgacca

SEQ ID NO: 5114 - DNA, 20 bp, Artificial Sequence
  Chr5q_6 Reverse Primer
catagaggccactaccccaa

SEQ ID NO: 5115 - DNA, 23 bp, Artificial Sequence
  Chr5q_6 Reverse Primer
tccagtccaattgacaaataagc

SEQ ID NO: 5116 - DNA, 20 bp, Artificial Sequence
  Chr5q_6 Reverse Primer
taatctccttttccccacca

SEQ ID NO: 5117 - DNA, 21 bp, Artificial Sequence
  Chr5q_6 Reverse Primer
tgctgttgtgctgtcatgagt

SEQ ID NO: 5118 - DNA, 23 bp, Artificial Sequence
  Chr5q_6 Reverse Primer
ttgcatcttgactatgacttgga

SEQ ID NO: 5119 - DNA, 23 bp, Artificial Sequence
  Chr5q_6 Reverse Primer
ttctaatttgacgaacttctgga

SEQ ID NO: 5120 - DNA, 20 bp, Artificial Sequence
  Chr5q_6 Reverse Primer
actagggaataaggggcagc

SEQ ID NO: 5121 - DNA, 20 bp, Artificial Sequence
  Chr5q_6 Reverse Primer
tctgtgtgcaacgacatgaa

SEQ ID NO: 5122 - DNA, 24 bp, Artificial Sequence
  Chr5q_6 Reverse Primer
ggtcagaaacgtatttgtttttcc

SEQ ID NO: 5123 - DNA, 21 bp, Artificial Sequence
  Chr5q_6 Reverse Primer
tgctcattattggaggcattc

SEQ ID NO: 5124 - DNA, 20 bp, Artificial Sequence
  Chr5q_6 Reverse Primer
ttccagggatgctttctgac

SEQ ID NO: 5125 - DNA, 20 bp, Artificial Sequence
  Chr5q_6 Reverse Primer
taccttgattcctgcaccgt

SEQ ID NO: 5126 - DNA, 21 bp, Artificial Sequence
  Chr5q_6 Reverse Primer
cgaaatgactggccactttta

SEQ ID NO: 5127 - DNA, 20 bp, Artificial Sequence
  Chr5q_6 Reverse Primer
ttcgatccatttctggctct

SEQ ID NO: 5128 - DNA, 20 bp, Artificial Sequence
  Chr5q_6 Reverse Primer
tacaaaagaggcctgtgcaa

SEQ ID NO: 5129 - DNA, 20 bp, Artificial Sequence
  Chr5q_6 Reverse Primer
tccatagaaatgctctgccc

SEQ ID NO: 5130 - DNA, 21 bp, Artificial Sequence
  Chr5q_6 Reverse Primer
agccttgcagaatgttcaaaa

SEQ ID NO: 5131 - DNA, 20 bp, Artificial Sequence
  Chr5q_6 Reverse Primer
tctgctggcattctggaaat

SEQ ID NO: 5132 - DNA, 20 bp, Artificial Sequence
  Chr5q_6 Reverse Primer
ggacagcctacaacaaggga

SEQ ID NO: 5133 - DNA, 20 bp, Artificial Sequence
  Chr5q_6 Reverse Primer
tagccagtgagctgcttgag

SEQ ID NO: 5134 - DNA, 20 bp, Artificial Sequence
  Chr5q_6 Reverse Primer
ttgcaaaaatgagtgcatga

SEQ ID NO: 5135 - DNA, 20 bp, Artificial Sequence
  Chr5q_6 Reverse Primer
aggcaggtgggaggaagtat

SEQ ID NO: 5136 - DNA, 22 bp, Artificial Sequence
  Chr5q_6 Reverse Primer
gaaatacattttgcaatccagg

SEQ ID NO: 5137 - DNA, 20 bp, Artificial Sequence
  Chr5q_6 Reverse Primer
tgagctggagttaggcatga

SEQ ID NO: 5138 - DNA, 20 bp, Artificial Sequence
  Chr5q_6 Reverse Primer
tggcatcctcaagtggaaat

SEQ ID NO: 5139 - DNA, 21 bp, Artificial Sequence
  Chr5q_6 Reverse Primer
caaaatcggtcatctccagaa

SEQ ID NO: 5140 - DNA, 20 bp, Artificial Sequence
  Chr5q_6 Reverse Primer
tggcatgcattgaaaacatc

SEQ ID NO: 5141 - DNA, 20 bp, Artificial Sequence
  Chr5q_6 Reverse Primer
acaacgatcttcccaatcca

SEQ ID NO: 5142 - DNA, 20 bp, Artificial Sequence
  Chr5q_6 Reverse Primer
cctggctacacctggatgtt

SEQ ID NO: 5143 - DNA, 20 bp, Artificial Sequence
  Chr5q_6 Reverse Primer
tgagcaattaagggagcagc

SEQ ID NO: 5144 - DNA, 20 bp, Artificial Sequence
  Chr5q_6 Reverse Primer
agtagagcgtcccagagcag

SEQ ID NO: 5145 - DNA, 20 bp, Artificial Sequence
  Chr5q_6 Reverse Primer
catatgaaatttggaggggg

SEQ ID NO: 5146 - DNA, 20 bp, Artificial Sequence
  Chr5q_6 Reverse Primer
ttatcttcttcccccgatca

SEQ ID NO: 5147 - DNA, 20 bp, Artificial Sequence
  Chr5q_6 Reverse Primer
atcagtggttgccatctgtg

SEQ ID NO: 5148 - DNA, 20 bp, Artificial Sequence
  Chr5q_6 Reverse Primer
actcagggccaaagtcttga

SEQ ID NO: 5149 - DNA, 20 bp, Artificial Sequence
  Chr5q_6 Reverse Primer
agtaaggaagggcagcctgt

SEQ ID NO: 5150 - DNA, 22 bp, Artificial Sequence
  Chr5q_6 Reverse Primer
ggaagacactggggtaaaagtt

SEQ ID NO: 5151 - DNA, 19 bp, Artificial Sequence
  Chr5q_6 Reverse Primer
gctagggactggggaggtt

SEQ ID NO: 5152 - DNA, 20 bp, Artificial Sequence
  Chr5q_6 Reverse Primer
acaggaacctgtgcaatcct

SEQ ID NO: 5153 - DNA, 20 bp, Artificial Sequence
  Chr5q_6 Reverse Primer
aaattagggttcgggctcaa

SEQ ID NO: 5154 - DNA, 20 bp, Artificial Sequence
  Chr5q_6 Reverse Primer
ccattgtcttccttccttgc

SEQ ID NO: 5155 - DNA, 20 bp, Artificial Sequence
  Chr5q_6 Reverse Primer
aactttccatcctgttccca

SEQ ID NO: 5156 - DNA, 22 bp, Artificial Sequence
  Chr5q_6 Reverse Primer
aaagtcacttctgccatgtttt

SEQ ID NO: 5157 - DNA, 20 bp, Artificial Sequence
  Chr5q_6 Reverse Primer
tcacctctgcagaattgggt

SEQ ID NO: 5158 - DNA, 21 bp, Artificial Sequence
  Chr5q_6 Reverse Primer
gacttgtagctgcactgagcc

SEQ ID NO: 5159 - DNA, 20 bp, Artificial Sequence
  Chr5q_6 Reverse Primer
gagtaaggccaggtggatga

SEQ ID NO: 5160 - DNA, 21 bp, Artificial Sequence
  Chr5q_6 Reverse Primer
tgtttttccatggttcctgtg

SEQ ID NO: 5161 - DNA, 20 bp, Artificial Sequence
  Chr5q_6 Reverse Primer
tgcacactttgctcttggac

SEQ ID NO: 5162 - DNA, 21 bp, Artificial Sequence
  Chr5q_6 Reverse Primer
tgcaaggaagaccagacattc

SEQ ID NO: 5163 - DNA, 22 bp, Artificial Sequence
  Chr5q_6 Reverse Primer
cctaggaagcaatttgcatagg

SEQ ID NO: 5164 - DNA, 20 bp, Artificial Sequence
  Chr5q_6 Reverse Primer
gaaaaatgtttcccctgggt

SEQ ID NO: 5165 - DNA, 27 bp, Artificial Sequence
  Chr5q_6 Reverse Primer
tgatgatctagatttttactgtttctg

SEQ ID NO: 5166 - DNA, 23 bp, Artificial Sequence
  Chr5q_6 Reverse Primer
tgactcatggaagttccctaaaa

SEQ ID NO: 5167 - DNA, 20 bp, Artificial Sequence
  Chr5q_6 Reverse Primer
caagggaagcagcaagaaag

SEQ ID NO: 5168 - DNA, 20 bp, Artificial Sequence
  Chr5q_6 Reverse Primer
ggatgcttctgaaagggtca

SEQ ID NO: 5169 - DNA, 20 bp, Artificial Sequence
  Chr5q_6 Reverse Primer
ctgcagccatttttgcatta

SEQ ID NO: 5170 - DNA, 20 bp, Artificial Sequence
  Chr5q_6 Reverse Primer
ttggcaattgttttctctgc

SEQ ID NO: 5171 - DNA, 21 bp, Artificial Sequence
  Chr5q_6 Reverse Primer
tgtctggcttgtatcatgtgc

SEQ ID NO: 5172 - DNA, 21 bp, Artificial Sequence
  Chr5q_6 Reverse Primer
aaatcacacatgcaagccttt

SEQ ID NO: 5173 - DNA, 24 bp, Artificial Sequence
  Chr5q_6 Reverse Primer
gcagaaaatgagtaagtgcagaaa

SEQ ID NO: 5174 - DNA, 20 bp, Artificial Sequence
  Chr5q_6 Reverse Primer
tccaaacagcatcttaggca

SEQ ID NO: 5175 - DNA, 20 bp, Artificial Sequence
  Chr5q_6 Reverse Primer
ttttggcttcatttgatggt

SEQ ID NO: 5176 - DNA, 20 bp, Artificial Sequence
  Chr5q_6 Reverse Primer
ccacaagacagagcactgga

SEQ ID NO: 5177 - DNA, 25 bp, Artificial Sequence
  Chr5q_6 Reverse Primer
ttttgttgttgtttagagatttgga

SEQ ID NO: 5178 - DNA, 20 bp, Artificial Sequence
  Chr5q_6 Reverse Primer
gtgagaagctgtcccatcca

SEQ ID NO: 5179 - DNA, 21 bp, Artificial Sequence
  Chr5q_6 Reverse Primer
cataggcttgaccaaacaaca

SEQ ID NO: 5180 - DNA, 20 bp, Artificial Sequence
  Chr5q_6 Reverse Primer
gggagcagacccatcagtaa

SEQ ID NO: 5181 - DNA, 20 bp, Artificial Sequence
  Chr5q_6 Reverse Primer
tacaagtggcaggctagcaa

SEQ ID NO: 5182 - DNA, 20 bp, Artificial Sequence
  Chr5q_6 Reverse Primer
ctctgaaatgagtgcctcca

SEQ ID NO: 5183 - DNA, 20 bp, Artificial Sequence
  Chr5q_6 Reverse Primer
tgttggcaaccttagcagtg

SEQ ID NO: 5184 - DNA, 23 bp, Artificial Sequence
  Chr5q_6 Reverse Primer
tgtgtcttggaattatcagaagc

SEQ ID NO: 5185 - DNA, 20 bp, Artificial Sequence
  Chr5q_6 Reverse Primer
cgtctgtgcgattggataaa

SEQ ID NO: 5186 - DNA, 23 bp, Artificial Sequence
  Chr5q_6 Reverse Primer
aaaggtcaacaccttttaaagcc

SEQ ID NO: 5187 - DNA, 25 bp, Artificial Sequence
  Chr5q_6 Reverse Primer
tgaaatagcattcacctatgtcaga

SEQ ID NO: 5188 - DNA, 23 bp, Artificial Sequence
  Chr5q_6 Reverse Primer
gcacatacagaattttcctcacc

SEQ ID NO: 5189 - DNA, 20 bp, Artificial Sequence
  Chr5q_6 Reverse Primer
caaactgtccctgcaaatga

SEQ ID NO: 5190 - DNA, 23 bp, Artificial Sequence
  Chr5q_6 Reverse Primer
tggaagaaaaagaaatgatttgg

SEQ ID NO: 5191 - DNA, 20 bp, Artificial Sequence
  Chr5q_6 Reverse Primer
tggtttttcccttcatctgg

SEQ ID NO: 5192 - DNA, 23 bp, Artificial Sequence
  Chr5q_6 Reverse Primer
ggacacacatcaaataaaccaga

SEQ ID NO: 5193 - DNA, 20 bp, Artificial Sequence
  Chr5q_6 Reverse Primer
tgaacctctcttggcacaaa

SEQ ID NO: 5194 - DNA, 20 bp, Artificial Sequence
  Chr5q_6 Reverse Primer
ggaccttggtttctctgcct

SEQ ID NO: 5195 - DNA, 20 bp, Artificial Sequence
  Chr5q_6 Reverse Primer
gatgctggcattttggagtt

SEQ ID NO: 5196 - DNA, 20 bp, Artificial Sequence
  Chr5q_6 Reverse Primer
catcctcatctctcccctca

SEQ ID NO: 5197 - DNA, 23 bp, Artificial Sequence
  Chr5q_6 Reverse Primer
tcacaagaatcgaatgaatgtgt

SEQ ID NO: 5198 - DNA, 20 bp, Artificial Sequence
  Chr5q_6 Reverse Primer
tgctctttttgggattctgc

SEQ ID NO: 5199 - DNA, 20 bp, Artificial Sequence
  Chr5q_6 Reverse Primer
tgtgaaaacagttccgtcca

SEQ ID NO: 5200 - DNA, 22 bp, Artificial Sequence
  Chr5q_6 Reverse Primer
cagaaatacaagaccagcctga

SEQ ID NO: 5201 - DNA, 20 bp, Artificial Sequence
  Chr5q_7 Forward Primer
ctgcccagcccacattatac

SEQ ID NO: 5202 - DNA, 20 bp, Artificial Sequence
  Chr5q_7 Forward Primer
tccagtgggtgtgatgaaga

SEQ ID NO: 5203 - DNA, 20 bp, Artificial Sequence
  Chr5q_7 Forward Primer
aggctctcctcacaatcctg

SEQ ID NO: 5204 - DNA, 22 bp, Artificial Sequence
  Chr5q_7 Forward Primer
ttgttgctcaagtcacatgttc

SEQ ID NO: 5205 - DNA, 22 bp, Artificial Sequence
  Chr5q_7 Forward Primer
catctggtatgcctcaattttt

SEQ ID NO: 5206 - DNA, 20 bp, Artificial Sequence
  Chr5q_7 Forward Primer
taaaataatgctgccagccc

SEQ ID NO: 5207 - DNA, 23 bp, Artificial Sequence
  Chr5q_7 Forward Primer
acctccatgaaacatacacaaca

SEQ ID NO: 5208 - DNA, 20 bp, Artificial Sequence
  Chr5q_7 Forward Primer
cagtaacagtccctgcccat

SEQ ID NO: 5209 - DNA, 20 bp, Artificial Sequence
  Chr5q_7 Forward Primer
taataggctttctgccccaa

SEQ ID NO: 5210 - DNA, 20 bp, Artificial Sequence
  Chr5q_7 Forward Primer
ccctcccgacagatgactac

SEQ ID NO: 5211 - DNA, 20 bp, Artificial Sequence
  Chr5q_7 Forward Primer
tcttgcccctctggtttatg

SEQ ID NO: 5212 - DNA, 20 bp, Artificial Sequence
  Chr5q_7 Forward Primer
cctgccagtgatttcaacct

SEQ ID NO: 5213 - DNA, 21 bp, Artificial Sequence
  Chr5q_7 Forward Primer
tgcaaaatcagcaagtcattg

SEQ ID NO: 5214 - DNA, 24 bp, Artificial Sequence
  Chr5q_7 Forward Primer
ttgtctaaccagaaatggaacaga

SEQ ID NO: 5215 - DNA, 20 bp, Artificial Sequence
  Chr5q_7 Forward Primer
gagcactggggaaaccatta

SEQ ID NO: 5216 - DNA, 20 bp, Artificial Sequence
  Chr5q_7 Forward Primer
aacagccaagtgtctgaggg

SEQ ID NO: 5217 - DNA, 20 bp, Artificial Sequence
  Chr5q_7 Forward Primer
aacaaccatctgtcagggct

SEQ ID NO: 5218 - DNA, 22 bp, Artificial Sequence
  Chr5q_7 Forward Primer
gcacatcctagcttacaaagca

SEQ ID NO: 5219 - DNA, 20 bp, Artificial Sequence
  Chr5q_7 Forward Primer
cctaccaccactccctcaaa

SEQ ID NO: 5220 - DNA, 20 bp, Artificial Sequence
  Chr5q_7 Forward Primer
ctttaggggaccccaagttt

SEQ ID NO: 5221 - DNA, 20 bp, Artificial Sequence
  Chr5q_7 Forward Primer
gccaaagaacttgggaacat

SEQ ID NO: 5222 - DNA, 22 bp, Artificial Sequence
  Chr5q_7 Forward Primer
ccgtggtaaattactggaaaca

SEQ ID NO: 5223 - DNA, 20 bp, Artificial Sequence
  Chr5q_7 Forward Primer
actcgccaggtgctacttct

SEQ ID NO: 5224 - DNA, 21 bp, Artificial Sequence
  Chr5q_7 Forward Primer
tgtgctttttaagggcaacaa

SEQ ID NO: 5225 - DNA, 20 bp, Artificial Sequence
  Chr5q_7 Forward Primer
aacccatgagtttctgtgcc

SEQ ID NO: 5226 - DNA, 20 bp, Artificial Sequence
  Chr5q_7 Forward Primer
tgtttttcatgaaggccaat

SEQ ID NO: 5227 - DNA, 21 bp, Artificial Sequence
  Chr5q_7 Forward Primer
tgcccaaataaaatcctcaaa

SEQ ID NO: 5228 - DNA, 22 bp, Artificial Sequence
  Chr5q_7 Forward Primer
ggttgaaaaacaacagaacgtc

SEQ ID NO: 5229 - DNA, 20 bp, Artificial Sequence
  Chr5q_7 Forward Primer
tgtccctcccttccttcttt

SEQ ID NO: 5230 - DNA, 21 bp, Artificial Sequence
  Chr5q_7 Forward Primer
tttctttggggagactgttct

SEQ ID NO: 5231 - DNA, 20 bp, Artificial Sequence
  Chr5q_7 Forward Primer
tgcgtatctgtctcctgcaa

SEQ ID NO: 5232 - DNA, 20 bp, Artificial Sequence
  Chr5q_7 Forward Primer
ccactctgttcccaggtgtt

SEQ ID NO: 5233 - DNA, 21 bp, Artificial Sequence
  Chr5q_7 Forward Primer
aaggaagacaatgatggctca

SEQ ID NO: 5234 - DNA, 20 bp, Artificial Sequence
  Chr5q_7 Forward Primer
tcatcgtgaagccatcttga

SEQ ID NO: 5235 - DNA, 20 bp, Artificial Sequence
  Chr5q_7 Forward Primer
gaaatcaggtcaggagccag

SEQ ID NO: 5236 - DNA, 20 bp, Artificial Sequence
  Chr5q_7 Forward Primer
gggagtcactgatcgaggaa

SEQ ID NO: 5237 - DNA, 20 bp, Artificial Sequence
  Chr5q_7 Forward Primer
agagcctttccaaacaatgg

SEQ ID NO: 5238 - DNA, 20 bp, Artificial Sequence
  Chr5q_7 Forward Primer
ttacctccctggagtggaac

SEQ ID NO: 5239 - DNA, 20 bp, Artificial Sequence
  Chr5q_7 Forward Primer
gctttttccaagcacattcc

SEQ ID NO: 5240 - DNA, 20 bp, Artificial Sequence
  Chr5q_7 Forward Primer
tggatttttcttggtctggg

SEQ ID NO: 5241 - DNA, 20 bp, Artificial Sequence
  Chr5q_7 Forward Primer
gctcaggacaaaaagaagcc

SEQ ID NO: 5242 - DNA, 20 bp, Artificial Sequence
  Chr5q_7 Forward Primer
tcccctcagtctttcttcca

SEQ ID NO: 5243 - DNA, 20 bp, Artificial Sequence
  Chr5q_7 Forward Primer
actttggcttggccacatta

SEQ ID NO: 5244 - DNA, 21 bp, Artificial Sequence
  Chr5q_7 Forward Primer
gatctgcagacacacaaacca

SEQ ID NO: 5245 - DNA, 20 bp, Artificial Sequence
  Chr5q_7 Forward Primer
cagatggggcaacaaactaa

SEQ ID NO: 5246 - DNA, 22 bp, Artificial Sequence
  Chr5q_7 Forward Primer
tgtgaagataagggctcagaga

SEQ ID NO: 5247 - DNA, 20 bp, Artificial Sequence
  Chr5q_7 Forward Primer
aaaggggtgggctagttcat

SEQ ID NO: 5248 - DNA, 20 bp, Artificial Sequence
  Chr5q_7 Forward Primer
acatcatggtcccaatgagc

SEQ ID NO: 5249 - DNA, 24 bp, Artificial Sequence
  Chr5q_7 Forward Primer
ctctttcctgtccaagaataagtt

SEQ ID NO: 5250 - DNA, 20 bp, Artificial Sequence
  Chr5q_7 Forward Primer
tgagtaagagctgggatggg

SEQ ID NO: 5251 - DNA, 21 bp, Artificial Sequence
  Chr5q_7 Forward Primer
ggaacactgaaccaagcagtc

SEQ ID NO: 5252 - DNA, 20 bp, Artificial Sequence
  Chr5q_7 Forward Primer
ctcttctgcccaaaggagtg

SEQ ID NO: 5253 - DNA, 20 bp, Artificial Sequence
  Chr5q_7 Forward Primer
actggttcatggtgtgggat

SEQ ID NO: 5254 - DNA, 20 bp, Artificial Sequence
  Chr5q_7 Forward Primer
tgctaccaaaaagggaaagg

SEQ ID NO: 5255 - DNA, 20 bp, Artificial Sequence
  Chr5q_7 Forward Primer
caaaggcacagaaagaggga

SEQ ID NO: 5256 - DNA, 20 bp, Artificial Sequence
  Chr5q_7 Forward Primer
atccctcttggacttggctt

SEQ ID NO: 5257 - DNA, 20 bp, Artificial Sequence
  Chr5q_7 Forward Primer
ttcccttcccagttccttct

SEQ ID NO: 5258 - DNA, 21 bp, Artificial Sequence
  Chr5q_7 Forward Primer
ggaggaagatctcccctatga

SEQ ID NO: 5259 - DNA, 20 bp, Artificial Sequence
  Chr5q_7 Forward Primer
aactccaatcgttaatggcg

SEQ ID NO: 5260 - DNA, 20 bp, Artificial Sequence
  Chr5q_7 Forward Primer
tgctgcacatcacagaatca

SEQ ID NO: 5261 - DNA, 20 bp, Artificial Sequence
  Chr5q_7 Forward Primer
gcattcatttcggcttccta

SEQ ID NO: 5262 - DNA, 20 bp, Artificial Sequence
  Chr5q_7 Forward Primer
caaataatcgcaccctggtt

SEQ ID NO: 5263 - DNA, 26 bp, Artificial Sequence
  Chr5q_7 Forward Primer
cacccaataaatattcttagcaatca

SEQ ID NO: 5264 - DNA, 20 bp, Artificial Sequence
  Chr5q_7 Forward Primer
tcaggcaaatccttcactcc

SEQ ID NO: 5265 - DNA, 20 bp, Artificial Sequence
  Chr5q_7 Forward Primer
tttgggtttcactcatttgg

SEQ ID NO: 5266 - DNA, 20 bp, Artificial Sequence
  Chr5q_7 Forward Primer
aattcctcaaacgattccca

SEQ ID NO: 5267 - DNA, 20 bp, Artificial Sequence
  Chr5q_7 Forward Primer
gtaagcccatgaatgccact

SEQ ID NO: 5268 - DNA, 20 bp, Artificial Sequence
  Chr5q_7 Forward Primer
ggcaatcatgttgaaaacca

SEQ ID NO: 5269 - DNA, 20 bp, Artificial Sequence
  Chr5q_7 Forward Primer
aacacaaaactgtgggggtg

SEQ ID NO: 5270 - DNA, 22 bp, Artificial Sequence
  Chr5q_7 Forward Primer
aagtttaacaggagagccatgc

SEQ ID NO: 5271 - DNA, 20 bp, Artificial Sequence
  Chr5q_7 Forward Primer
gtgccaaaagggactgacat

SEQ ID NO: 5272 - DNA, 23 bp, Artificial Sequence
  Chr5q_7 Forward Primer
ttgcaacatacatgaaacctctg

SEQ ID NO: 5273 - DNA, 20 bp, Artificial Sequence
  Chr5q_7 Forward Primer
tccatgtggtgctttgacac

SEQ ID NO: 5274 - DNA, 20 bp, Artificial Sequence
  Chr5q_7 Forward Primer
atctgcagtaggacacgctg

SEQ ID NO: 5275 - DNA, 20 bp, Artificial Sequence
  Chr5q_7 Forward Primer
gggtaacttcggcctagctc

SEQ ID NO: 5276 - DNA, 20 bp, Artificial Sequence
  Chr5q_7 Forward Primer
tagacacatcgcctcaccac

SEQ ID NO: 5277 - DNA, 20 bp, Artificial Sequence
  Chr5q_7 Forward Primer
gctgctctttgttcccagac

SEQ ID NO: 5278 - DNA, 21 bp, Artificial Sequence
  Chr5q_7 Forward Primer
tgcagtgatttaccctcaacc

SEQ ID NO: 5279 - DNA, 20 bp, Artificial Sequence
  Chr5q_7 Forward Primer
taagaagaccctcggaagca

SEQ ID NO: 5280 - DNA, 20 bp, Artificial Sequence
  Chr5q_7 Forward Primer
aataaggaggtggaggaggc

SEQ ID NO: 5281 - DNA, 20 bp, Artificial Sequence
  Chr5q_7 Forward Primer
cagacacacaaagagtccgc

SEQ ID NO: 5282 - DNA, 20 bp, Artificial Sequence
  Chr5q_7 Forward Primer
ctccttccctatacgctccc

SEQ ID NO: 5283 - DNA, 20 bp, Artificial Sequence
  Chr5q_7 Forward Primer
ccatccactttttcccctaa

SEQ ID NO: 5284 - DNA, 20 bp, Artificial Sequence
  Chr5q_7 Forward Primer
tgcctgttagactgcactgg

SEQ ID NO: 5285 - DNA, 20 bp, Artificial Sequence
  Chr5q_7 Forward Primer
tctcctctaggtgaaggggg

SEQ ID NO: 5286 - DNA, 20 bp, Artificial Sequence
  Chr5q_7 Forward Primer
aaggggtcagggagactcat

SEQ ID NO: 5287 - DNA, 20 bp, Artificial Sequence
  Chr5q_7 Forward Primer
ccaaagtgaaggtgcagtgt

SEQ ID NO: 5288 - DNA, 20 bp, Artificial Sequence
  Chr5q_7 Forward Primer
tgattcttgggttctgtccc

SEQ ID NO: 5289 - DNA, 20 bp, Artificial Sequence
  Chr5q_7 Forward Primer
atggatcccacctctccttc

SEQ ID NO: 5290 - DNA, 21 bp, Artificial Sequence
  Chr5q_7 Forward Primer
cacagtgcaccaggtacagaa

SEQ ID NO: 5291 - DNA, 20 bp, Artificial Sequence
  Chr5q_7 Forward Primer
tgggctaataagcaggtgac

SEQ ID NO: 5292 - DNA, 20 bp, Artificial Sequence
  Chr5q_7 Forward Primer
atgggaaaggaaaagaggga

SEQ ID NO: 5293 - DNA, 20 bp, Artificial Sequence
  Chr5q_7 Forward Primer
gcagcaaacatgtggaagag

SEQ ID NO: 5294 - DNA, 20 bp, Artificial Sequence
  Chr5q_7 Forward Primer
cataagggaaaggaaaccga

SEQ ID NO: 5295 - DNA, 20 bp, Artificial Sequence
  Chr5q_7 Forward Primer
atgcaaaagcaaacacagga

SEQ ID NO: 5296 - DNA, 20 bp, Artificial Sequence
  Chr5q_7 Forward Primer
accaaccaaacggtggatta

SEQ ID NO: 5297 - DNA, 20 bp, Artificial Sequence
  Chr5q_7 Reverse Primer
aaacctgacactggggaatg

SEQ ID NO: 5298 - DNA, 20 bp, Artificial Sequence
  Chr5q_7 Reverse Primer
agcccccactttcctatgac

SEQ ID NO: 5299 - DNA, 20 bp, Artificial Sequence
  Chr5q_7 Reverse Primer
gtattgtgcatcatgtgggc

SEQ ID NO: 5300 - DNA, 20 bp, Artificial Sequence
  Chr5q_7 Reverse Primer
tgcatttagttcacccctgg

SEQ ID NO: 5301 - DNA, 20 bp, Artificial Sequence
  Chr5q_7 Reverse Primer
aagggtgtgtgagtggtgaa

SEQ ID NO: 5302 - DNA, 20 bp, Artificial Sequence
  Chr5q_7 Reverse Primer
ggagcagttttaaggcaagc

SEQ ID NO: 5303 - DNA, 23 bp, Artificial Sequence
  Chr5q_7 Reverse Primer
gagtactccagccatagtaggca

SEQ ID NO: 5304 - DNA, 20 bp, Artificial Sequence
  Chr5q_7 Reverse Primer
gactccatagggagaacgca

SEQ ID NO: 5305 - DNA, 20 bp, Artificial Sequence
  Chr5q_7 Reverse Primer
tcagctctgttggcacaaat

SEQ ID NO: 5306 - DNA, 20 bp, Artificial Sequence
  Chr5q_7 Reverse Primer
cgtggatcatggtattcagg

SEQ ID NO: 5307 - DNA, 20 bp, Artificial Sequence
  Chr5q_7 Reverse Primer
ttaaaagacacccacacccc

SEQ ID NO: 5308 - DNA, 20 bp, Artificial Sequence
  Chr5q_7 Reverse Primer
gtcctcccccagctgttact

SEQ ID NO: 5309 - DNA, 21 bp, Artificial Sequence
  Chr5q_7 Reverse Primer
cgtggtttcattgttctgaca

SEQ ID NO: 5310 - DNA, 23 bp, Artificial Sequence
  Chr5q_7 Reverse Primer
tttgaatacccattataggctgc

SEQ ID NO: 5311 - DNA, 20 bp, Artificial Sequence
  Chr5q_7 Reverse Primer
tgaaagttagacctccccga

SEQ ID NO: 5312 - DNA, 20 bp, Artificial Sequence
  Chr5q_7 Reverse Primer
tttaaggcctttcccctctc

SEQ ID NO: 5313 - DNA, 20 bp, Artificial Sequence
  Chr5q_7 Reverse Primer
cctcaattacggcttccaaa

SEQ ID NO: 5314 - DNA, 20 bp, Artificial Sequence
  Chr5q_7 Reverse Primer
gcagcaggatagtggaagga

SEQ ID NO: 5315 - DNA, 20 bp, Artificial Sequence
  Chr5q_7 Reverse Primer
aacaaggcagatggtggatt

SEQ ID NO: 5316 - DNA, 20 bp, Artificial Sequence
  Chr5q_7 Reverse Primer
tttctttgcttcctgtgcct

SEQ ID NO: 5317 - DNA, 20 bp, Artificial Sequence
  Chr5q_7 Reverse Primer
actaccagaaggccaaagca

SEQ ID NO: 5318 - DNA, 20 bp, Artificial Sequence
  Chr5q_7 Reverse Primer
cactgggaatggaatggaag

SEQ ID NO: 5319 - DNA, 20 bp, Artificial Sequence
  Chr5q_7 Reverse Primer
gatcacccctgctgtacctg

SEQ ID NO: 5320 - DNA, 20 bp, Artificial Sequence
  Chr5q_7 Reverse Primer
ccttggctgattctgacagc

SEQ ID NO: 5321 - DNA, 20 bp, Artificial Sequence
  Chr5q_7 Reverse Primer
cgtgtccatgtttggagtgt

SEQ ID NO: 5322 - DNA, 25 bp, Artificial Sequence
  Chr5q_7 Reverse Primer
catggaaaaagcagttttaaaagaa

SEQ ID NO: 5323 - DNA, 21 bp, Artificial Sequence
  Chr5q_7 Reverse Primer
tcaaacttccccagaattcaa

SEQ ID NO: 5324 - DNA, 26 bp, Artificial Sequence
  Chr5q_7 Reverse Primer
cccaactatcaatacattcaagagaa

SEQ ID NO: 5325 - DNA, 20 bp, Artificial Sequence
  Chr5q_7 Reverse Primer
tttttaggaccttgggggac

SEQ ID NO: 5326 - DNA, 20 bp, Artificial Sequence
  Chr5q_7 Reverse Primer
ggaccccatcagggataaag

SEQ ID NO: 5327 - DNA, 19 bp, Artificial Sequence
  Chr5q_7 Reverse Primer
gcgcatgaattctccttga

SEQ ID NO: 5328 - DNA, 20 bp, Artificial Sequence
  Chr5q_7 Reverse Primer
gttttccccactgtgtgctt

SEQ ID NO: 5329 - DNA, 20 bp, Artificial Sequence
  Chr5q_7 Reverse Primer
agcttgtttcagacacccca

SEQ ID NO: 5330 - DNA, 20 bp, Artificial Sequence
  Chr5q_7 Reverse Primer
agcagccaaacaagcagaat

SEQ ID NO: 5331 - DNA, 20 bp, Artificial Sequence
  Chr5q_7 Reverse Primer
ggctggaatgagaggaacac

SEQ ID NO: 5332 - DNA, 20 bp, Artificial Sequence
  Chr5q_7 Reverse Primer
tcctggtttactttgggctg

SEQ ID NO: 5333 - DNA, 20 bp, Artificial Sequence
  Chr5q_7 Reverse Primer
gtcacaggggcaaagaaaag

SEQ ID NO: 5334 - DNA, 19 bp, Artificial Sequence
  Chr5q_7 Reverse Primer
ggtgtgctggggcataata

SEQ ID NO: 5335 - DNA, 20 bp, Artificial Sequence
  Chr5q_7 Reverse Primer
tcatgttgttgggggaaaat

SEQ ID NO: 5336 - DNA, 20 bp, Artificial Sequence
  Chr5q_7 Reverse Primer
gaagggtttgcagctaccag

SEQ ID NO: 5337 - DNA, 20 bp, Artificial Sequence
  Chr5q_7 Reverse Primer
tctgcctcacatggtactgc

SEQ ID NO: 5338 - DNA, 20 bp, Artificial Sequence
  Chr5q_7 Reverse Primer
atgagtgcacctggaaaacc

SEQ ID NO: 5339 - DNA, 20 bp, Artificial Sequence
  Chr5q_7 Reverse Primer
tttgagagttcatttggggg

SEQ ID NO: 5340 - DNA, 21 bp, Artificial Sequence
  Chr5q_7 Reverse Primer
ccatctttagaactggctgga

SEQ ID NO: 5341 - DNA, 24 bp, Artificial Sequence
  Chr5q_7 Reverse Primer
tgcatcatagaaacaattcatctg

SEQ ID NO: 5342 - DNA, 20 bp, Artificial Sequence
  Chr5q_7 Reverse Primer
tttccagcccaaactaatgg

SEQ ID NO: 5343 - DNA, 20 bp, Artificial Sequence
  Chr5q_7 Reverse Primer
gtagatgagtgcgccatgtg

SEQ ID NO: 5344 - DNA, 20 bp, Artificial Sequence
  Chr5q_7 Reverse Primer
ttctttgccagccaactttc

SEQ ID NO: 5345 - DNA, 21 bp, Artificial Sequence
  Chr5q_7 Reverse Primer
catcacacaccatgtcctttg

SEQ ID NO: 5346 - DNA, 20 bp, Artificial Sequence
  Chr5q_7 Reverse Primer
aaggtctgtctgcccctttt

SEQ ID NO: 5347 - DNA, 20 bp, Artificial Sequence
  Chr5q_7 Reverse Primer
ggcagcacagtttgtctcaa

SEQ ID NO: 5348 - DNA, 20 bp, Artificial Sequence
  Chr5q_7 Reverse Primer
tataagtcaggcattccggg

SEQ ID NO: 5349 - DNA, 20 bp, Artificial Sequence
  Chr5q_7 Reverse Primer
ttcctctaccagtgggatgg

SEQ ID NO: 5350 - DNA, 21 bp, Artificial Sequence
  Chr5q_7 Reverse Primer
tgaatttgaatggcaactcct

SEQ ID NO: 5351 - DNA, 20 bp, Artificial Sequence
  Chr5q_7 Reverse Primer
tgccttctccacctcatacc

SEQ ID NO: 5352 - DNA, 20 bp, Artificial Sequence
  Chr5q_7 Reverse Primer
cacccccatgtacctagctg

SEQ ID NO: 5353 - DNA, 20 bp, Artificial Sequence
  Chr5q_7 Reverse Primer
gcatcttagagatggcccag

SEQ ID NO: 5354 - DNA, 25 bp, Artificial Sequence
  Chr5q_7 Reverse Primer
ggactatttgctccttgagagtaag

SEQ ID NO: 5355 - DNA, 20 bp, Artificial Sequence
  Chr5q_7 Reverse Primer
gactggggattggggatagt

SEQ ID NO: 5356 - DNA, 20 bp, Artificial Sequence
  Chr5q_7 Reverse Primer
gctaacctttcccagcttcc

SEQ ID NO: 5357 - DNA, 20 bp, Artificial Sequence
  Chr5q_7 Reverse Primer
taggccccagaaggttttat

SEQ ID NO: 5358 - DNA, 25 bp, Artificial Sequence
  Chr5q_7 Reverse Primer
tttgtacctaggaagagcttcaaga

SEQ ID NO: 5359 - DNA, 21 bp, Artificial Sequence
  Chr5q_7 Reverse Primer
gaaatcgtaccagcaaatcca

SEQ ID NO: 5360 - DNA, 20 bp, Artificial Sequence
  Chr5q_7 Reverse Primer
ggcgtaacttcgtggtccta

SEQ ID NO: 5361 - DNA, 21 bp, Artificial Sequence
  Chr5q_7 Reverse Primer
ggaaaaggtatttgagcagca

SEQ ID NO: 5362 - DNA, 20 bp, Artificial Sequence
  Chr5q_7 Reverse Primer
gacaaagattggggagggat

SEQ ID NO: 5363 - DNA, 20 bp, Artificial Sequence
  Chr5q_7 Reverse Primer
ctcagtgtgtgtgtgtgcca

SEQ ID NO: 5364 - DNA, 23 bp, Artificial Sequence
  Chr5q_7 Reverse Primer
tttacatttggctttctgctaaa

SEQ ID NO: 5365 - DNA, 20 bp, Artificial Sequence
  Chr5q_7 Reverse Primer
gtgtatgggcctccttgaac

SEQ ID NO: 5366 - DNA, 20 bp, Artificial Sequence
  Chr5q_7 Reverse Primer
ctcctctttctgccttttgg

SEQ ID NO: 5367 - DNA, 20 bp, Artificial Sequence
  Chr5q_7 Reverse Primer
gccaaagctgagagtggaag

SEQ ID NO: 5368 - DNA, 20 bp, Artificial Sequence
  Chr5q_7 Reverse Primer
gtgcaaatggttcccaactt

SEQ ID NO: 5369 - DNA, 20 bp, Artificial Sequence
  Chr5q_7 Reverse Primer
tttctttgaaacgagggtgg

SEQ ID NO: 5370 - DNA, 23 bp, Artificial Sequence
  Chr5q_7 Reverse Primer
tgacaaagcttatgatccacaga

SEQ ID NO: 5371 - DNA, 20 bp, Artificial Sequence
  Chr5q_7 Reverse Primer
atgtgaattggatgtggcaa

SEQ ID NO: 5372 - DNA, 20 bp, Artificial Sequence
  Chr5q_7 Reverse Primer
aatagcccaggactctgcaa

SEQ ID NO: 5373 - DNA, 20 bp, Artificial Sequence
  Chr5q_7 Reverse Primer
gggagaaggacagaatggtg

SEQ ID NO: 5374 - DNA, 22 bp, Artificial Sequence
  Chr5q_7 Reverse Primer
gggagggccttaaaaataaatg

SEQ ID NO: 5375 - DNA, 20 bp, Artificial Sequence
  Chr5q_7 Reverse Primer
aattcttttgggaaggggtg

SEQ ID NO: 5376 - DNA, 20 bp, Artificial Sequence
  Chr5q_7 Reverse Primer
attttctgcttcgctcagga

SEQ ID NO: 5377 - DNA, 18 bp, Artificial Sequence
  Chr5q_7 Reverse Primer
agctctggctggttgtgc

SEQ ID NO: 5378 - DNA, 20 bp, Artificial Sequence
  Chr5q_7 Reverse Primer
tcctgctttattggcaacag

SEQ ID NO: 5379 - DNA, 20 bp, Artificial Sequence
  Chr5q_7 Reverse Primer
cccagcaacaagcatacaga

SEQ ID NO: 5380 - DNA, 20 bp, Artificial Sequence
  Chr5q_7 Reverse Primer
ttccagtacttccctggctg

SEQ ID NO: 5381 - DNA, 20 bp, Artificial Sequence
  Chr5q_7 Reverse Primer
ttatcccgtaatggagcagg

SEQ ID NO: 5382 - DNA, 20 bp, Artificial Sequence
  Chr5q_7 Reverse Primer
cttcaccccagacgacaaat

SEQ ID NO: 5383 - DNA, 20 bp, Artificial Sequence
  Chr5q_7 Reverse Primer
cttagctcatgatctgcccc

SEQ ID NO: 5384 - DNA, 20 bp, Artificial Sequence
  Chr5q_7 Reverse Primer
gaactggttaccccaagcaa

SEQ ID NO: 5385 - DNA, 21 bp, Artificial Sequence
  Chr5q_7 Reverse Primer
ggtggtgatgcctaaactgaa

SEQ ID NO: 5386 - DNA, 20 bp, Artificial Sequence
  Chr5q_7 Reverse Primer
ggatggagaccaggacaaaa

SEQ ID NO: 5387 - DNA, 20 bp, Artificial Sequence
  Chr5q_7 Reverse Primer
atttcctcatttctgcccct

SEQ ID NO: 5388 - DNA, 20 bp, Artificial Sequence
  Chr5q_7 Reverse Primer
cccactgatcctcccataga

SEQ ID NO: 5389 - DNA, 20 bp, Artificial Sequence
  Chr5q_7 Reverse Primer
gttctgagaaaaacgagccg

SEQ ID NO: 5390 - DNA, 20 bp, Artificial Sequence
  Chr5q_7 Reverse Primer
tgtcaatggctgagttcctg

SEQ ID NO: 5391 - DNA, 20 bp, Artificial Sequence
  Chr5q_7 Reverse Primer
cctccttgttcttcacctcc

SEQ ID NO: 5392 - DNA, 20 bp, Artificial Sequence
  Chr5q_7 Reverse Primer
cctgaaagcataaccctgga

SEQ ID NO: 5393 - DNA, 20 bp, Artificial Sequence
  Chr5q_8 Forward Primer
ggcttactgtttgccaagga

SEQ ID NO: 5394 - DNA, 20 bp, Artificial Sequence
  Chr5q_8 Forward Primer
ataccagcgttgcacagaga

SEQ ID NO: 5395 - DNA, 22 bp, Artificial Sequence
  Chr5q_8 Forward Primer
cacacacacactatgatccagg

SEQ ID NO: 5396 - DNA, 21 bp, Artificial Sequence
  Chr5q_8 Forward Primer
aatgcaatctctgccttcaaa

SEQ ID NO: 5397 - DNA, 27 bp, Artificial Sequence
  Chr5q_8 Forward Primer
tcatttcacttaattatatgtgcttgc

SEQ ID NO: 5398 - DNA, 20 bp, Artificial Sequence
  Chr5q_8 Forward Primer
ggctggcctgttcattatgt

SEQ ID NO: 5399 - DNA, 21 bp, Artificial Sequence
  Chr5q_8 Forward Primer
cctggtcatattgccaagact

SEQ ID NO: 5400 - DNA, 20 bp, Artificial Sequence
  Chr5q_8 Forward Primer
acaaccaggggatcaaaaca

SEQ ID NO: 5401 - DNA, 21 bp, Artificial Sequence
  Chr5q_8 Forward Primer
aaggaacagatgtcaaaccaa

SEQ ID NO: 5402 - DNA, 20 bp, Artificial Sequence
  Chr5q_8 Forward Primer
tgaacctcatgcaggaagaa

SEQ ID NO: 5403 - DNA, 20 bp, Artificial Sequence
  Chr5q_8 Forward Primer
tcatcatgcagcattggttt

SEQ ID NO: 5404 - DNA, 20 bp, Artificial Sequence
  Chr5q_8 Forward Primer
caaaaagcctaatcacccca

SEQ ID NO: 5405 - DNA, 21 bp, Artificial Sequence
  Chr5q_8 Forward Primer
aaatgtttggggaacactgaa

SEQ ID NO: 5406 - DNA, 22 bp, Artificial Sequence
  Chr5q_8 Forward Primer
gcttatcccatcaatttttgaa

SEQ ID NO: 5407 - DNA, 26 bp, Artificial Sequence
  Chr5q_8 Forward Primer
ttcatcttggaatgctataattctct

SEQ ID NO: 5408 - DNA, 21 bp, Artificial Sequence
  Chr5q_8 Forward Primer
gcaatttcaatccctgaaaca

SEQ ID NO: 5409 - DNA, 25 bp, Artificial Sequence
  Chr5q_8 Forward Primer
aacctcatacaaaagtcaagaaagg

SEQ ID NO: 5410 - DNA, 20 bp, Artificial Sequence
  Chr5q_8 Forward Primer
atggcatgatctgacagcag

SEQ ID NO: 5411 - DNA, 24 bp, Artificial Sequence
  Chr5q_8 Forward Primer
tggaaaatccaaataaggtaaagg

SEQ ID NO: 5412 - DNA, 20 bp, Artificial Sequence
  Chr5q_8 Forward Primer
ttgcaaagcaaagactgcac

SEQ ID NO: 5413 - DNA, 20 bp, Artificial Sequence
  Chr5q_8 Forward Primer
tgaggtcaatgtggctgaag

SEQ ID NO: 5414 - DNA, 20 bp, Artificial Sequence
  Chr5q_8 Forward Primer
cctcaactcccacacaggat

SEQ ID NO: 5415 - DNA, 20 bp, Artificial Sequence
  Chr5q_8 Forward Primer
ttttcccctttgcatttctg

SEQ ID NO: 5416 - DNA, 20 bp, Artificial Sequence
  Chr5q_8 Forward Primer
agagacattggccaaacagc

SEQ ID NO: 5417 - DNA, 20 bp, Artificial Sequence
  Chr5q_8 Forward Primer
tgtcctgtgggtacatggaa

SEQ ID NO: 5418 - DNA, 20 bp, Artificial Sequence
  Chr5q_8 Forward Primer
tgcttttcatcaccaagagg

SEQ ID NO: 5419 - DNA, 21 bp, Artificial Sequence
  Chr5q_8 Forward Primer
gggctaagtctttttcttgga

SEQ ID NO: 5420 - DNA, 20 bp, Artificial Sequence
  Chr5q_8 Forward Primer
gtttgttgaagatggggtgg

SEQ ID NO: 5421 - DNA, 21 bp, Artificial Sequence
  Chr5q_8 Forward Primer
cccatgagtagacagggttca

SEQ ID NO: 5422 - DNA, 24 bp, Artificial Sequence
  Chr5q_8 Forward Primer
ttcttaatgggctagtaatggagc

SEQ ID NO: 5423 - DNA, 25 bp, Artificial Sequence
  Chr5q_8 Forward Primer
aaaactcaacagttttcacaaatga

SEQ ID NO: 5424 - DNA, 20 bp, Artificial Sequence
  Chr5q_8 Forward Primer
cagagaaagagtccaagccg

SEQ ID NO: 5425 - DNA, 23 bp, Artificial Sequence
  Chr5q_8 Forward Primer
tcctatttggtcgtctcatgaat

SEQ ID NO: 5426 - DNA, 20 bp, Artificial Sequence
  Chr5q_8 Forward Primer
tccattaacaaacccagcaa

SEQ ID NO: 5427 - DNA, 20 bp, Artificial Sequence
  Chr5q_8 Forward Primer
ttgcctgggaaacttctcct

SEQ ID NO: 5428 - DNA, 20 bp, Artificial Sequence
  Chr5q_8 Forward Primer
tgcctctaagctcaacacca

SEQ ID NO: 5429 - DNA, 20 bp, Artificial Sequence
  Chr5q_8 Forward Primer
gcatttctgttggattttgc

SEQ ID NO: 5430 - DNA, 24 bp, Artificial Sequence
  Chr5q_8 Forward Primer
ttgtccacatactgattctgttca

SEQ ID NO: 5431 - DNA, 21 bp, Artificial Sequence
  Chr5q_8 Forward Primer
tcccttaatgctctctcctga

SEQ ID NO: 5432 - DNA, 23 bp, Artificial Sequence
  Chr5q_8 Forward Primer
tttggaaaaatataaatccacgg

SEQ ID NO: 5433 - DNA, 20 bp, Artificial Sequence
  Chr5q_8 Forward Primer
agaatgccatgaaaacaggc

SEQ ID NO: 5434 - DNA, 23 bp, Artificial Sequence
  Chr5q_8 Forward Primer
tgtagacccaaagagactccaaa

SEQ ID NO: 5435 - DNA, 20 bp, Artificial Sequence
  Chr5q_8 Forward Primer
tatggttgctcctagggctg

SEQ ID NO: 5436 - DNA, 21 bp, Artificial Sequence
  Chr5q_8 Forward Primer
aaagcctctcacacctgaaca

SEQ ID NO: 5437 - DNA, 20 bp, Artificial Sequence
  Chr5q_8 Forward Primer
tccagttgcctccgtaagtt

SEQ ID NO: 5438 - DNA, 22 bp, Artificial Sequence
  Chr5q_8 Forward Primer
tcaaaggcaattgttgtcattc

SEQ ID NO: 5439 - DNA, 20 bp, Artificial Sequence
  Chr5q_8 Forward Primer
tcatcccaatgcagtcatgt

SEQ ID NO: 5440 - DNA, 20 bp, Artificial Sequence
  Chr5q_8 Forward Primer
gataggagctggccaaaatg

SEQ ID NO: 5441 - DNA, 20 bp, Artificial Sequence
  Chr5q_8 Forward Primer
agagatggtaggagggctga

SEQ ID NO: 5442 - DNA, 20 bp, Artificial Sequence
  Chr5q_8 Forward Primer
tgccagaagcccctagaaat

SEQ ID NO: 5443 - DNA, 20 bp, Artificial Sequence
  Chr5q_8 Forward Primer
tgaaagtgagcgtcatcagg

SEQ ID NO: 5444 - DNA, 20 bp, Artificial Sequence
  Chr5q_8 Forward Primer
ctggtttgctttttccgaag

SEQ ID NO: 5445 - DNA, 25 bp, Artificial Sequence
  Chr5q_8 Forward Primer
caagacaatattttactcatgccaa

SEQ ID NO: 5446 - DNA, 20 bp, Artificial Sequence
  Chr5q_8 Forward Primer
ttgtgcagaaaatgctttgg

SEQ ID NO: 5447 - DNA, 24 bp, Artificial Sequence
  Chr5q_8 Forward Primer
tccccagtagtttctataggctaa

SEQ ID NO: 5448 - DNA, 23 bp, Artificial Sequence
  Chr5q_8 Forward Primer
tgccaatcatttctaacaaacaa

SEQ ID NO: 5449 - DNA, 20 bp, Artificial Sequence
  Chr5q_8 Forward Primer
cagcatatggccattgaaaa

SEQ ID NO: 5450 - DNA, 20 bp, Artificial Sequence
  Chr5q_8 Forward Primer
gggaacacagtgtcctggtc

SEQ ID NO: 5451 - DNA, 21 bp, Artificial Sequence
  Chr5q_8 Forward Primer
gcaatgagaagtcatggaagg

SEQ ID NO: 5452 - DNA, 20 bp, Artificial Sequence
  Chr5q_8 Forward Primer
ctggcctgggaacagagtta

SEQ ID NO: 5453 - DNA, 23 bp, Artificial Sequence
  Chr5q_8 Forward Primer
aatgcattaaaaactgcataggt

SEQ ID NO: 5454 - DNA, 20 bp, Artificial Sequence
  Chr5q_8 Forward Primer
gattggaacgcagtggaagt

SEQ ID NO: 5455 - DNA, 25 bp, Artificial Sequence
  Chr5q_8 Forward Primer
actatgaactcacagaaaagaatcc

SEQ ID NO: 5456 - DNA, 20 bp, Artificial Sequence
  Chr5q_8 Forward Primer
gtcaggctccccactacaag

SEQ ID NO: 5457 - DNA, 20 bp, Artificial Sequence
  Chr5q_8 Forward Primer
cacaacatacccctcgtcct

SEQ ID NO: 5458 - DNA, 20 bp, Artificial Sequence
  Chr5q_8 Forward Primer
accgcagacaccaaggtaag

SEQ ID NO: 5459 - DNA, 21 bp, Artificial Sequence
  Chr5q_8 Forward Primer
gctcatgcatcgattatggtt

SEQ ID NO: 5460 - DNA, 20 bp, Artificial Sequence
  Chr5q_8 Forward Primer
agggactggaaaagatgggt

SEQ ID NO: 5461 - DNA, 20 bp, Artificial Sequence
  Chr5q_8 Forward Primer
tgtggctctgtgttccattc

SEQ ID NO: 5462 - DNA, 20 bp, Artificial Sequence
  Chr5q_8 Forward Primer
gtggctttcagcagaggagt

SEQ ID NO: 5463 - DNA, 20 bp, Artificial Sequence
  Chr5q_8 Forward Primer
agctggataagcagaaggca

SEQ ID NO: 5464 - DNA, 24 bp, Artificial Sequence
  Chr5q_8 Forward Primer
gcttgtcacttttatttctgtcca

SEQ ID NO: 5465 - DNA, 20 bp, Artificial Sequence
  Chr5q_8 Forward Primer
tggatggcaatcattgagaa

SEQ ID NO: 5466 - DNA, 20 bp, Artificial Sequence
  Chr5q_8 Forward Primer
acccctgcaggtagatcaaa

SEQ ID NO: 5467 - DNA, 24 bp, Artificial Sequence
  Chr5q_8 Forward Primer
ccataatttattcaactatccccc

SEQ ID NO: 5468 - DNA, 20 bp, Artificial Sequence
  Chr5q_8 Forward Primer
caatttgcgtttccatcagt

SEQ ID NO: 5469 - DNA, 26 bp, Artificial Sequence
  Chr5q_8 Forward Primer
tctgcactaaaaatctcttttctcaa

SEQ ID NO: 5470 - DNA, 20 bp, Artificial Sequence
  Chr5q_8 Forward Primer
ttccaccaaactacggggta

SEQ ID NO: 5471 - DNA, 21 bp, Artificial Sequence
  Chr5q_8 Forward Primer
ccctatgggaattttgcattt

SEQ ID NO: 5472 - DNA, 20 bp, Artificial Sequence
  Chr5q_8 Forward Primer
atatccacctgggcctgact

SEQ ID NO: 5473 - DNA, 20 bp, Artificial Sequence
  Chr5q_8 Forward Primer
aaccagcaaattcacatccc

SEQ ID NO: 5474 - DNA, 20 bp, Artificial Sequence
  Chr5q_8 Forward Primer
ggcaaactatgcctccatca

SEQ ID NO: 5475 - DNA, 20 bp, Artificial Sequence
  Chr5q_8 Forward Primer
gcttcgaatgtctcatggtg

SEQ ID NO: 5476 - DNA, 23 bp, Artificial Sequence
  Chr5q_8 Forward Primer
gcttgctgaaatctttatgatgg

SEQ ID NO: 5477 - DNA, 20 bp, Artificial Sequence
  Chr5q_8 Forward Primer
cttgtgaagctgccatcaga

SEQ ID NO: 5478 - DNA, 20 bp, Artificial Sequence
  Chr5q_8 Forward Primer
tgggatgatattccaaggga

SEQ ID NO: 5479 - DNA, 20 bp, Artificial Sequence
  Chr5q_8 Forward Primer
ggcaaatgaactggcagact

SEQ ID NO: 5480 - DNA, 20 bp, Artificial Sequence
  Chr5q_8 Forward Primer
tgcaccagtaaacctccctc

SEQ ID NO: 5481 - DNA, 20 bp, Artificial Sequence
  Chr5q_8 Forward Primer
atttaaaatgggctcccctc

SEQ ID NO: 5482 - DNA, 24 bp, Artificial Sequence
  Chr5q_8 Forward Primer
tgtgttttcttccataggattttg

SEQ ID NO: 5483 - DNA, 20 bp, Artificial Sequence
  Chr5q_8 Forward Primer
tgggataacatctcttgggc

SEQ ID NO: 5484 - DNA, 20 bp, Artificial Sequence
  Chr5q_8 Forward Primer
aaataggctgaatgcccaaa

SEQ ID NO: 5485 - DNA, 21 bp, Artificial Sequence
  Chr5q_8 Forward Primer
tgttgcatagctgtaatccca

SEQ ID NO: 5486 - DNA, 20 bp, Artificial Sequence
  Chr5q_8 Forward Primer
tggaatcctgtctgagtccc

SEQ ID NO: 5487 - DNA, 22 bp, Artificial Sequence
  Chr5q_8 Forward Primer
gaaatctcctctcacctccaga

SEQ ID NO: 5488 - DNA, 21 bp, Artificial Sequence
  Chr5q_8 Forward Primer
ggactgaatcaccttcaccaa

SEQ ID NO: 5489 - DNA, 21 bp, Artificial Sequence
  Chr5q_8 Reverse Primer
ttacattgttgattccccagc

SEQ ID NO: 5490 - DNA, 20 bp, Artificial Sequence
  Chr5q_8 Reverse Primer
agccccctagaccactgttt

SEQ ID NO: 5491 - DNA, 24 bp, Artificial Sequence
  Chr5q_8 Reverse Primer
tcaaacaaaaagcattactaggca

SEQ ID NO: 5492 - DNA, 20 bp, Artificial Sequence
  Chr5q_8 Reverse Primer
tgatgcttggatccattgag

SEQ ID NO: 5493 - DNA, 20 bp, Artificial Sequence
  Chr5q_8 Reverse Primer
taaacctgtgaggcattccc

SEQ ID NO: 5494 - DNA, 21 bp, Artificial Sequence
  Chr5q_8 Reverse Primer
tggcttgtcctgaatagtgct

SEQ ID NO: 5495 - DNA, 20 bp, Artificial Sequence
  Chr5q_8 Reverse Primer
tcaggtgatgccagtcctaa

SEQ ID NO: 5496 - DNA, 20 bp, Artificial Sequence
  Chr5q_8 Reverse Primer
cataggatgcccatgtttca

SEQ ID NO: 5497 - DNA, 24 bp, Artificial Sequence
  Chr5q_8 Reverse Primer
tgcatattttagagctcctagcac

SEQ ID NO: 5498 - DNA, 20 bp, Artificial Sequence
  Chr5q_8 Reverse Primer
aacctattggaggctgctca

SEQ ID NO: 5499 - DNA, 20 bp, Artificial Sequence
  Chr5q_8 Reverse Primer
ttgtcccaagtcctggtagc

SEQ ID NO: 5500 - DNA, 20 bp, Artificial Sequence
  Chr5q_8 Reverse Primer
aagttttggcaacaaggcac

SEQ ID NO: 5501 - DNA, 23 bp, Artificial Sequence
  Chr5q_8 Reverse Primer
cctttgaaaaacatcatgaagga

SEQ ID NO: 5502 - DNA, 20 bp, Artificial Sequence
  Chr5q_8 Reverse Primer
ggtatggcttttgcctctga

SEQ ID NO: 5503 - DNA, 23 bp, Artificial Sequence
  Chr5q_8 Reverse Primer
ccaaagataaaatgttgcaaaga

SEQ ID NO: 5504 - DNA, 20 bp, Artificial Sequence
  Chr5q_8 Reverse Primer
ttaaatcttggcagccactg

SEQ ID NO: 5505 - DNA, 22 bp, Artificial Sequence
  Chr5q_8 Reverse Primer
tctctattggcaattgtccctc

SEQ ID NO: 5506 - DNA, 20 bp, Artificial Sequence
  Chr5q_8 Reverse Primer
gctgaattctcttttcccca

SEQ ID NO: 5507 - DNA, 20 bp, Artificial Sequence
  Chr5q_8 Reverse Primer
ccactcttggaaccctttct

SEQ ID NO: 5508 - DNA, 20 bp, Artificial Sequence
  Chr5q_8 Reverse Primer
ccccaaagtcagggctttat

SEQ ID NO: 5509 - DNA, 20 bp, Artificial Sequence
  Chr5q_8 Reverse Primer
tattttgactttggcagccc

SEQ ID NO: 5510 - DNA, 20 bp, Artificial Sequence
  Chr5q_8 Reverse Primer
ttcagagccaaaaatgggag

SEQ ID NO: 5511 - DNA, 20 bp, Artificial Sequence
  Chr5q_8 Reverse Primer
aaagctgtgctttcaagcct

SEQ ID NO: 5512 - DNA, 20 bp, Artificial Sequence
  Chr5q_8 Reverse Primer
tggctgcttctaggtttgct

SEQ ID NO: 5513 - DNA, 21 bp, Artificial Sequence
  Chr5q_8 Reverse Primer
gcctgggttactacccttttg

SEQ ID NO: 5514 - DNA, 22 bp, Artificial Sequence
  Chr5q_8 Reverse Primer
tggttggattttcctcattaaa

SEQ ID NO: 5515 - DNA, 22 bp, Artificial Sequence
  Chr5q_8 Reverse Primer
ggccatggatattaggaaaaca

SEQ ID NO: 5516 - DNA, 21 bp, Artificial Sequence
  Chr5q_8 Reverse Primer
tctcagggaaagagacagtgg

SEQ ID NO: 5517 - DNA, 20 bp, Artificial Sequence
  Chr5q_8 Reverse Primer
gcatttcccagagaaagcat

SEQ ID NO: 5518 - DNA, 22 bp, Artificial Sequence
  Chr5q_8 Reverse Primer
gcaccctctgtataatggaaaa

SEQ ID NO: 5519 - DNA, 20 bp, Artificial Sequence
  Chr5q_8 Reverse Primer
ggaatagtcagccatgggaa

SEQ ID NO: 5520 - DNA, 20 bp, Artificial Sequence
  Chr5q_8 Reverse Primer
aagaaagctgggggatgttc

SEQ ID NO: 5521 - DNA, 20 bp, Artificial Sequence
  Chr5q_8 Reverse Primer
tgtggctctttctgcttgaa

SEQ ID NO: 5522 - DNA, 20 bp, Artificial Sequence
  Chr5q_8 Reverse Primer
tcttccaaatgcaaaccaaa

SEQ ID NO: 5523 - DNA, 20 bp, Artificial Sequence
  Chr5q_8 Reverse Primer
caaatcaagactgcctggaa

SEQ ID NO: 5524 - DNA, 20 bp, Artificial Sequence
  Chr5q_8 Reverse Primer
caatttgagtagcccgaagc

SEQ ID NO: 5525 - DNA, 20 bp, Artificial Sequence
  Chr5q_8 Reverse Primer
tgtcatgccactgcatacct

SEQ ID NO: 5526 - DNA, 20 bp, Artificial Sequence
  Chr5q_8 Reverse Primer
tagctccgagagtgggagaa

SEQ ID NO: 5527 - DNA, 22 bp, Artificial Sequence
  Chr5q_8 Reverse Primer
cccgaaaatcacttacagaagg

SEQ ID NO: 5528 - DNA, 20 bp, Artificial Sequence
  Chr5q_8 Reverse Primer
acaaaggggatggggaaata

SEQ ID NO: 5529 - DNA, 20 bp, Artificial Sequence
  Chr5q_8 Reverse Primer
tccattggcaagactaaggc

SEQ ID NO: 5530 - DNA, 20 bp, Artificial Sequence
  Chr5q_8 Reverse Primer
gcggaaaattcatcaacctg

SEQ ID NO: 5531 - DNA, 20 bp, Artificial Sequence
  Chr5q_8 Reverse Primer
gatggaagggcaaccactaa

SEQ ID NO: 5532 - DNA, 20 bp, Artificial Sequence
  Chr5q_8 Reverse Primer
ggtgaagcaaagaatgctcc

SEQ ID NO: 5533 - DNA, 21 bp, Artificial Sequence
  Chr5q_8 Reverse Primer
aggtcagagaggtatccaggg

SEQ ID NO: 5534 - DNA, 21 bp, Artificial Sequence
  Chr5q_8 Reverse Primer
tctgggaaaagttggtcattt

SEQ ID NO: 5535 - DNA, 20 bp, Artificial Sequence
  Chr5q_8 Reverse Primer
tggttgaaagtgcatggaac

SEQ ID NO: 5536 - DNA, 20 bp, Artificial Sequence
  Chr5q_8 Reverse Primer
aatcaacccatgcagtgtca

SEQ ID NO: 5537 - DNA, 21 bp, Artificial Sequence
  Chr5q_8 Reverse Primer
gggcataattttctcaaaggc

SEQ ID NO: 5538 - DNA, 20 bp, Artificial Sequence
  Chr5q_8 Reverse Primer
ctgttgtgaggcgtgtgact

SEQ ID NO: 5539 - DNA, 20 bp, Artificial Sequence
  Chr5q_8 Reverse Primer
tgcagtgtcttcacattggc

SEQ ID NO: 5540 - DNA, 23 bp, Artificial Sequence
  Chr5q_8 Reverse Primer
cacacaatagaagcatttcctca

SEQ ID NO: 5541 - DNA, 22 bp, Artificial Sequence
  Chr5q_8 Reverse Primer
aaatgcttgagcataccaaatg

SEQ ID NO: 5542 - DNA, 21 bp, Artificial Sequence
  Chr5q_8 Reverse Primer
gctgagcataattgcatttcc

SEQ ID NO: 5543 - DNA, 24 bp, Artificial Sequence
  Chr5q_8 Reverse Primer
cctcagtctcattttatgactttg

SEQ ID NO: 5544 - DNA, 20 bp, Artificial Sequence
  Chr5q_8 Reverse Primer
ttcacccaagatcacaccct

SEQ ID NO: 5545 - DNA, 19 bp, Artificial Sequence
  Chr5q_8 Reverse Primer
tggcagaacagtggctctc

SEQ ID NO: 5546 - DNA, 20 bp, Artificial Sequence
  Chr5q_8 Reverse Primer
gactgacagggtgccttagc

SEQ ID NO: 5547 - DNA, 20 bp, Artificial Sequence
  Chr5q_8 Reverse Primer
aatcccaggggagattctgt

SEQ ID NO: 5548 - DNA, 20 bp, Artificial Sequence
  Chr5q_8 Reverse Primer
tcagatctccaaaggcatcc

SEQ ID NO: 5549 - DNA, 22 bp, Artificial Sequence
  Chr5q_8 Reverse Primer
ccttgagggtagagagtacccc

SEQ ID NO: 5550 - DNA, 20 bp, Artificial Sequence
  Chr5q_8 Reverse Primer
gcagttgtgagactccctga

SEQ ID NO: 5551 - DNA, 20 bp, Artificial Sequence
  Chr5q_8 Reverse Primer
tgtggaaccaagcaggtaga

SEQ ID NO: 5552 - DNA, 20 bp, Artificial Sequence
  Chr5q_8 Reverse Primer
catggacatgtgagacaggg

SEQ ID NO: 5553 - DNA, 20 bp, Artificial Sequence
  Chr5q_8 Reverse Primer
acctgatgcagggatgtagc

SEQ ID NO: 5554 - DNA, 20 bp, Artificial Sequence
  Chr5q_8 Reverse Primer
aggcatgtgggtgataaagg

SEQ ID NO: 5555 - DNA, 20 bp, Artificial Sequence
  Chr5q_8 Reverse Primer
cactctatccacagtccgca

SEQ ID NO: 5556 - DNA, 20 bp, Artificial Sequence
  Chr5q_8 Reverse Primer
gaaggacactctctgccacc

SEQ ID NO: 5557 - DNA, 20 bp, Artificial Sequence
  Chr5q_8 Reverse Primer
ggacagtgcagctgttttca

SEQ ID NO: 5558 - DNA, 20 bp, Artificial Sequence
  Chr5q_8 Reverse Primer
tcaaaatccagccacttcgt

SEQ ID NO: 5559 - DNA, 20 bp, Artificial Sequence
  Chr5q_8 Reverse Primer
ggccaaaagagttttctccc

SEQ ID NO: 5560 - DNA, 27 bp, Artificial Sequence
  Chr5q_8 Reverse Primer
tttttcttggtatataagaatgccttt

SEQ ID NO: 5561 - DNA, 20 bp, Artificial Sequence
  Chr5q_8 Reverse Primer
gggaggggaggaagtgataa

SEQ ID NO: 5562 - DNA, 20 bp, Artificial Sequence
  Chr5q_8 Reverse Primer
atgtgggaggttatgccatt

SEQ ID NO: 5563 - DNA, 21 bp, Artificial Sequence
  Chr5q_8 Reverse Primer
cattttggggaaaactgttga

SEQ ID NO: 5564 - DNA, 20 bp, Artificial Sequence
  Chr5q_8 Reverse Primer
tgacaaggagatggcaaaca

SEQ ID NO: 5565 - DNA, 26 bp, Artificial Sequence
  Chr5q_8 Reverse Primer
gaacaattctaaatgaatgaaagacc

SEQ ID NO: 5566 - DNA, 24 bp, Artificial Sequence
  Chr5q_8 Reverse Primer
caagccttcaagtaactcacagtc

SEQ ID NO: 5567 - DNA, 20 bp, Artificial Sequence
  Chr5q_8 Reverse Primer
acctacccaacctttgcctt

SEQ ID NO: 5568 - DNA, 21 bp, Artificial Sequence
  Chr5q_8 Reverse Primer
caagctagcaagtttgcctgt

SEQ ID NO: 5569 - DNA, 22 bp, Artificial Sequence
  Chr5q_8 Reverse Primer
ccacttcttccattagtggctc

SEQ ID NO: 5570 - DNA, 21 bp, Artificial Sequence
  Chr5q_8 Reverse Primer
gaaactgcaagaggactttgg

SEQ ID NO: 5571 - DNA, 20 bp, Artificial Sequence
  Chr5q_8 Reverse Primer
cccactgggccttattacag

SEQ ID NO: 5572 - DNA, 20 bp, Artificial Sequence
  Chr5q_8 Reverse Primer
ctgagctgaaatcccaggaa

SEQ ID NO: 5573 - DNA, 20 bp, Artificial Sequence
  Chr5q_8 Reverse Primer
actgcaagggggtaggaagt

SEQ ID NO: 5574 - DNA, 20 bp, Artificial Sequence
  Chr5q_8 Reverse Primer
aaggaggacctctggctttc

SEQ ID NO: 5575 - DNA, 20 bp, Artificial Sequence
  Chr5q_8 Reverse Primer
atcatatagtgccccgtgga

SEQ ID NO: 5576 - DNA, 20 bp, Artificial Sequence
  Chr5q_8 Reverse Primer
cagagttctgcacaatggga

SEQ ID NO: 5577 - DNA, 20 bp, Artificial Sequence
  Chr5q_8 Reverse Primer
cagaagtgtcacagttgggc

SEQ ID NO: 5578 - DNA, 25 bp, Artificial Sequence
  Chr5q_8 Reverse Primer
gcattagtctcatatttttgtttgc

SEQ ID NO: 5579 - DNA, 20 bp, Artificial Sequence
  Chr5q_8 Reverse Primer
aaagtggtcctggaaagggt

SEQ ID NO: 5580 - DNA, 20 bp, Artificial Sequence
  Chr5q_8 Reverse Primer
aaatgtggcccttttccttt

SEQ ID NO: 5581 - DNA, 21 bp, Artificial Sequence
  Chr5q_8 Reverse Primer
tgccaagttttcattgtagca

SEQ ID NO: 5582 - DNA, 20 bp, Artificial Sequence
  Chr5q_8 Reverse Primer
agagcgaggagactgtccat

SEQ ID NO: 5583 - DNA, 20 bp, Artificial Sequence
  Chr5q_8 Reverse Primer
aggcactatttgaggccttg

SEQ ID NO: 5584 - DNA, 22 bp, Artificial Sequence
  Chr5q_8 Reverse Primer
cctccagaaaattcttccttca

SEQ ID NO: 5585 - DNA, 21 bp, Artificial Sequence
  Chr5q_9 Forward Primer
aaacagagggggaaagacaaa

SEQ ID NO: 5586 - DNA, 19 bp, Artificial Sequence
  Chr5q_9 Forward Primer
caatgttttccaacgccag

SEQ ID NO: 5587 - DNA, 20 bp, Artificial Sequence
  Chr5q_9 Forward Primer
taccctgaagggcatccata

SEQ ID NO: 5588 - DNA, 20 bp, Artificial Sequence
  Chr5q_9 Forward Primer
ggtattcaaaagctgggcaa

SEQ ID NO: 5589 - DNA, 20 bp, Artificial Sequence
  Chr5q_9 Forward Primer
tctctttggagaagccctca

SEQ ID NO: 5590 - DNA, 24 bp, Artificial Sequence
  Chr5q_9 Forward Primer
tgatggacatccatgaatacataa

SEQ ID NO: 5591 - DNA, 20 bp, Artificial Sequence
  Chr5q_9 Forward Primer
gtcactcacctgcacagcat

SEQ ID NO: 5592 - DNA, 27 bp, Artificial Sequence
  Chr5q_9 Forward Primer
tgaattctacttgtccatattttacac

SEQ ID NO: 5593 - DNA, 20 bp, Artificial Sequence
  Chr5q_9 Forward Primer
atgcctcacaagtccaaagc

SEQ ID NO: 5594 - DNA, 20 bp, Artificial Sequence
  Chr5q_9 Forward Primer
tttccagggtgtttctggag

SEQ ID NO: 5595 - DNA, 20 bp, Artificial Sequence
  Chr5q_9 Forward Primer
ggggacaagaatggagagtg

SEQ ID NO: 5596 - DNA, 20 bp, Artificial Sequence
  Chr5q_9 Forward Primer
agcccctctttcttccttca

SEQ ID NO: 5597 - DNA, 20 bp, Artificial Sequence
  Chr5q_9 Forward Primer
tctaacttggcgtcaaagca

SEQ ID NO: 5598 - DNA, 23 bp, Artificial Sequence
  Chr5q_9 Forward Primer
tgcattgtgacaaggacatactc

SEQ ID NO: 5599 - DNA, 20 bp, Artificial Sequence
  Chr5q_9 Forward Primer
ctggctaacacactggctca

SEQ ID NO: 5600 - DNA, 20 bp, Artificial Sequence
  Chr5q_9 Forward Primer
atgtcctgtccctttcctca

SEQ ID NO: 5601 - DNA, 20 bp, Artificial Sequence
  Chr5q_9 Forward Primer
cccccatcatctaaaagcaa

SEQ ID NO: 5602 - DNA, 21 bp, Artificial Sequence
  Chr5q_9 Forward Primer
cagcaagtgaacaaaagtgga

SEQ ID NO: 5603 - DNA, 20 bp, Artificial Sequence
  Chr5q_9 Forward Primer
tggcagacatgaaaggacaa

SEQ ID NO: 5604 - DNA, 20 bp, Artificial Sequence
  Chr5q_9 Forward Primer
tgtccatttggcatgactgt

SEQ ID NO: 5605 - DNA, 22 bp, Artificial Sequence
  Chr5q_9 Forward Primer
agtttctggttgaggaggagtt

SEQ ID NO: 5606 - DNA, 20 bp, Artificial Sequence
  Chr5q_9 Forward Primer
tgggcagcctcagataattc

SEQ ID NO: 5607 - DNA, 20 bp, Artificial Sequence
  Chr5q_9 Forward Primer
ggttcttttctggagtcccc

SEQ ID NO: 5608 - DNA, 21 bp, Artificial Sequence
  Chr5q_9 Forward Primer
agcatttgtttcccatacctg

SEQ ID NO: 5609 - DNA, 22 bp, Artificial Sequence
  Chr5q_9 Forward Primer
tttccttgaatcaacacaaaaa

SEQ ID NO: 5610 - DNA, 23 bp, Artificial Sequence
  Chr5q_9 Forward Primer
tgaccagtatgactaaggaaggg

SEQ ID NO: 5611 - DNA, 24 bp, Artificial Sequence
  Chr5q_9 Forward Primer
caggtcactttaatgagctctctg

SEQ ID NO: 5612 - DNA, 20 bp, Artificial Sequence
  Chr5q_9 Forward Primer
gccccactaaagcaagatga

SEQ ID NO: 5613 - DNA, 20 bp, Artificial Sequence
  Chr5q_9 Forward Primer
aatcttcatgggattgtggg

SEQ ID NO: 5614 - DNA, 20 bp, Artificial Sequence
  Chr5q_9 Forward Primer
gcctccaagcagagaaaaag

SEQ ID NO: 5615 - DNA, 20 bp, Artificial Sequence
  Chr5q_9 Forward Primer
agagccgaagaacatgatgg

SEQ ID NO: 5616 - DNA, 24 bp, Artificial Sequence
  Chr5q_9 Forward Primer
tggacctttcagaaatttttgttt

SEQ ID NO: 5617 - DNA, 22 bp, Artificial Sequence
  Chr5q_9 Forward Primer
ttccaggcaatcttgaaattct

SEQ ID NO: 5618 - DNA, 22 bp, Artificial Sequence
  Chr5q_9 Forward Primer
aattaactgcaagttcaagggc

SEQ ID NO: 5619 - DNA, 21 bp, Artificial Sequence
  Chr5q_9 Forward Primer
tcctgcctcactccagttaaa

SEQ ID NO: 5620 - DNA, 23 bp, Artificial Sequence
  Chr5q_9 Forward Primer
aagctgtcataaaccattaggga

SEQ ID NO: 5621 - DNA, 20 bp, Artificial Sequence
  Chr5q_9 Forward Primer
atttccccttcctctctcca

SEQ ID NO: 5622 - DNA, 24 bp, Artificial Sequence
  Chr5q_9 Forward Primer
ttaaacacatctaaggctcctagc

SEQ ID NO: 5623 - DNA, 20 bp, Artificial Sequence
  Chr5q_9 Forward Primer
ccccactcccactctcaata

SEQ ID NO: 5624 - DNA, 21 bp, Artificial Sequence
  Chr5q_9 Forward Primer
cataaaatgtctgctggctgg

SEQ ID NO: 5625 - DNA, 24 bp, Artificial Sequence
  Chr5q_9 Forward Primer
tcatcaaattttgtgttttcacag

SEQ ID NO: 5626 - DNA, 23 bp, Artificial Sequence
  Chr5q_9 Forward Primer
tgatgcataaaccaaatgaatga

SEQ ID NO: 5627 - DNA, 21 bp, Artificial Sequence
  Chr5q_9 Forward Primer
aatggtgccactaatgtcagg

SEQ ID NO: 5628 - DNA, 20 bp, Artificial Sequence
  Chr5q_9 Forward Primer
acctcttgtcgagggagaca

SEQ ID NO: 5629 - DNA, 20 bp, Artificial Sequence
  Chr5q_9 Forward Primer
tggcccaatactgaaaaaca

SEQ ID NO: 5630 - DNA, 20 bp, Artificial Sequence
  Chr5q_9 Forward Primer
gccaaacttctctgactggc

SEQ ID NO: 5631 - DNA, 25 bp, Artificial Sequence
  Chr5q_9 Forward Primer
aattaatgaatggttgaacaaagtt

SEQ ID NO: 5632 - DNA, 20 bp, Artificial Sequence
  Chr5q_9 Forward Primer
acccaaaagcttcagagggt

SEQ ID NO: 5633 - DNA, 24 bp, Artificial Sequence
  Chr5q_9 Forward Primer
cttctttggatggtacaatattca

SEQ ID NO: 5634 - DNA, 26 bp, Artificial Sequence
  Chr5q_9 Forward Primer
gaattatcaaagcgttaaaacatgaa

SEQ ID NO: 5635 - DNA, 21 bp, Artificial Sequence
  Chr5q_9 Forward Primer
tggcctttactcatttgttca

SEQ ID NO: 5636 - DNA, 20 bp, Artificial Sequence
  Chr5q_9 Forward Primer
ggcaagcacgctacattttt

SEQ ID NO: 5637 - DNA, 20 bp, Artificial Sequence
  Chr5q_9 Forward Primer
tccttcaaaatgcagtccaa

SEQ ID NO: 5638 - DNA, 20 bp, Artificial Sequence
  Chr5q_9 Forward Primer
caaatctgtttcgcttgcag

SEQ ID NO: 5639 - DNA, 20 bp, Artificial Sequence
  Chr5q_9 Forward Primer
ctccactgaaaaccctccaa

SEQ ID NO: 5640 - DNA, 21 bp, Artificial Sequence
  Chr5q_9 Forward Primer
tcccatgaggtcagaagtgtt

SEQ ID NO: 5641 - DNA, 26 bp, Artificial Sequence
  Chr5q_9 Forward Primer
tgggagaataagattttaaaaggaaa

SEQ ID NO: 5642 - DNA, 22 bp, Artificial Sequence
  Chr5q_9 Forward Primer
actggctattctttcaggttca

SEQ ID NO: 5643 - DNA, 23 bp, Artificial Sequence
  Chr5q_9 Forward Primer
cacagaatacaagtccaggttct

SEQ ID NO: 5644 - DNA, 20 bp, Artificial Sequence
  Chr5q_9 Forward Primer
tttgcttcatgagcctcaaa

SEQ ID NO: 5645 - DNA, 22 bp, Artificial Sequence
  Chr5q_9 Forward Primer
tgctattcaaacttaatgcagc

SEQ ID NO: 5646 - DNA, 20 bp, Artificial Sequence
  Chr5q_9 Forward Primer
actctttcacggctgcaatc

SEQ ID NO: 5647 - DNA, 22 bp, Artificial Sequence
  Chr5q_9 Forward Primer
gaggataaagctgtatgtgcca

SEQ ID NO: 5648 - DNA, 20 bp, Artificial Sequence
  Chr5q_9 Forward Primer
tcctgccagggaagactaaa

SEQ ID NO: 5649 - DNA, 26 bp, Artificial Sequence
  Chr5q_9 Forward Primer
tctctaggttacacgagagtctttga

SEQ ID NO: 5650 - DNA, 20 bp, Artificial Sequence
  Chr5q_9 Forward Primer
acttatgctgctctctgggc

SEQ ID NO: 5651 - DNA, 20 bp, Artificial Sequence
  Chr5q_9 Forward Primer
tgttccgtaagggcagactc

SEQ ID NO: 5652 - DNA, 21 bp, Artificial Sequence
  Chr5q_9 Forward Primer
gcagtttttctgaccaatgct

SEQ ID NO: 5653 - DNA, 20 bp, Artificial Sequence
  Chr5q_9 Forward Primer
cgtgacattaccagaccgtg

SEQ ID NO: 5654 - DNA, 23 bp, Artificial Sequence
  Chr5q_9 Forward Primer
ctcagttgaacaagctttgagag

SEQ ID NO: 5655 - DNA, 20 bp, Artificial Sequence
  Chr5q_9 Forward Primer
tttctggctgataaaatggc

SEQ ID NO: 5656 - DNA, 22 bp, Artificial Sequence
  Chr5q_9 Forward Primer
ttctgcaattggtgaactatgg

SEQ ID NO: 5657 - DNA, 20 bp, Artificial Sequence
  Chr5q_9 Forward Primer
tctacccacacagcacatcg

SEQ ID NO: 5658 - DNA, 27 bp, Artificial Sequence
  Chr5q_9 Forward Primer
tgaaacaacaacttcatgtatttttac

SEQ ID NO: 5659 - DNA, 20 bp, Artificial Sequence
  Chr5q_9 Forward Primer
accacctaagcacttggcac

SEQ ID NO: 5660 - DNA, 21 bp, Artificial Sequence
  Chr5q_9 Forward Primer
ttcgtcctagctttctttccc

SEQ ID NO: 5661 - DNA, 20 bp, Artificial Sequence
  Chr5q_9 Forward Primer
tccttcctcccttccaaagt

SEQ ID NO: 5662 - DNA, 20 bp, Artificial Sequence
  Chr5q_9 Forward Primer
cattcccgtgctttcaatta

SEQ ID NO: 5663 - DNA, 20 bp, Artificial Sequence
  Chr5q_9 Forward Primer
tgcaattaaacagccagcaa

SEQ ID NO: 5664 - DNA, 20 bp, Artificial Sequence
  Chr5q_9 Forward Primer
attcctctgtggtgacctcg

SEQ ID NO: 5665 - DNA, 20 bp, Artificial Sequence
  Chr5q_9 Forward Primer
gggctgagacacttccagtc

SEQ ID NO: 5666 - DNA, 22 bp, Artificial Sequence
  Chr5q_9 Forward Primer
cccaactacactacaccaagca

SEQ ID NO: 5667 - DNA, 21 bp, Artificial Sequence
  Chr5q_9 Forward Primer
tcaagcttaagcctcatgtcc

SEQ ID NO: 5668 - DNA, 25 bp, Artificial Sequence
  Chr5q_9 Forward Primer
aagaaatggtagacacacacacaaa

SEQ ID NO: 5669 - DNA, 20 bp, Artificial Sequence
  Chr5q_9 Forward Primer
ttcaactttcaacaagcccc

SEQ ID NO: 5670 - DNA, 20 bp, Artificial Sequence
  Chr5q_9 Forward Primer
tcgcaatacagcagcagttc

SEQ ID NO: 5671 - DNA, 21 bp, Artificial Sequence
  Chr5q_9 Forward Primer
gcaatttaaatgcctcttcca

SEQ ID NO: 5672 - DNA, 23 bp, Artificial Sequence
  Chr5q_9 Forward Primer
tcattaggcaaatatccaaaaac

SEQ ID NO: 5673 - DNA, 20 bp, Artificial Sequence
  Chr5q_9 Forward Primer
tacctcccactttccttcca

SEQ ID NO: 5674 - DNA, 20 bp, Artificial Sequence
  Chr5q_9 Forward Primer
gcttgtaataccctggtggc

SEQ ID NO: 5675 - DNA, 20 bp, Artificial Sequence
  Chr5q_9 Forward Primer
tccccctgtatccataagca

SEQ ID NO: 5676 - DNA, 20 bp, Artificial Sequence
  Chr5q_9 Forward Primer
gctcattgctactgagccaa

SEQ ID NO: 5677 - DNA, 21 bp, Artificial Sequence
  Chr5q_9 Forward Primer
tgtttccaaagaacctcctga

SEQ ID NO: 5678 - DNA, 26 bp, Artificial Sequence
  Chr5q_9 Forward Primer
aagatcagtgttatggttgaagtagc

SEQ ID NO: 5679 - DNA, 20 bp, Artificial Sequence
  Chr5q_9 Forward Primer
tcatgtatgtcagcaacgca

SEQ ID NO: 5680 - DNA, 22 bp, Artificial Sequence
  Chr5q_9 Forward Primer
ggcaacctaaattacttctggc

SEQ ID NO: 5681 - DNA, 20 bp, Artificial Sequence
  Chr5q_9 Reverse Primer
gatggggaatggcaaaacta

SEQ ID NO: 5682 - DNA, 20 bp, Artificial Sequence
  Chr5q_9 Reverse Primer
ccctcccaatacctgatgaa

SEQ ID NO: 5683 - DNA, 20 bp, Artificial Sequence
  Chr5q_9 Reverse Primer
agtgccagtactccaaggga

SEQ ID NO: 5684 - DNA, 21 bp, Artificial Sequence
  Chr5q_9 Reverse Primer
tggcttagtgagcaacagtca

SEQ ID NO: 5685 - DNA, 22 bp, Artificial Sequence
  Chr5q_9 Reverse Primer
tttgtttctgagtccattttgg

SEQ ID NO: 5686 - DNA, 20 bp, Artificial Sequence
  Chr5q_9 Reverse Primer
tgttaagcagcagaacccaa

SEQ ID NO: 5687 - DNA, 20 bp, Artificial Sequence
  Chr5q_9 Reverse Primer
cttttgggggcatttttctt

SEQ ID NO: 5688 - DNA, 22 bp, Artificial Sequence
  Chr5q_9 Reverse Primer
tcagttgctcatcagaccttct

SEQ ID NO: 5689 - DNA, 20 bp, Artificial Sequence
  Chr5q_9 Reverse Primer
taggagtgacttatgccccc

SEQ ID NO: 5690 - DNA, 20 bp, Artificial Sequence
  Chr5q_9 Reverse Primer
gcaagaagattgggcagaag

SEQ ID NO: 5691 - DNA, 20 bp, Artificial Sequence
  Chr5q_9 Reverse Primer
tgattcaatcgaaaccagga

SEQ ID NO: 5692 - DNA, 20 bp, Artificial Sequence
  Chr5q_9 Reverse Primer
gcaaagcaatgagatccaca

SEQ ID NO: 5693 - DNA, 20 bp, Artificial Sequence
  Chr5q_9 Reverse Primer
ttgcagtcatccactccttg

SEQ ID NO: 5694 - DNA, 20 bp, Artificial Sequence
  Chr5q_9 Reverse Primer
cggttagcaaggactgtggt

SEQ ID NO: 5695 - DNA, 20 bp, Artificial Sequence
  Chr5q_9 Reverse Primer
gtttaactggggctttgtgc

SEQ ID NO: 5696 - DNA, 20 bp, Artificial Sequence
  Chr5q_9 Reverse Primer
gatttggaaattgccctcaa

SEQ ID NO: 5697 - DNA, 20 bp, Artificial Sequence
  Chr5q_9 Reverse Primer
gggtgctaaagacacaggct

SEQ ID NO: 5698 - DNA, 20 bp, Artificial Sequence
  Chr5q_9 Reverse Primer
gcaggtagagcaagaggagc

SEQ ID NO: 5699 - DNA, 20 bp, Artificial Sequence
  Chr5q_9 Reverse Primer
gtgtggacatgttggcaaag

SEQ ID NO: 5700 - DNA, 23 bp, Artificial Sequence
  Chr5q_9 Reverse Primer
tcatcctttcctctctcttctcc

SEQ ID NO: 5701 - DNA, 20 bp, Artificial Sequence
  Chr5q_9 Reverse Primer
tactttgcctcgttttccca

SEQ ID NO: 5702 - DNA, 25 bp, Artificial Sequence
  Chr5q_9 Reverse Primer
caaactcaattacagatgtggaaga

SEQ ID NO: 5703 - DNA, 20 bp, Artificial Sequence
  Chr5q_9 Reverse Primer
tggtccattgtctttcctca

SEQ ID NO: 5704 - DNA, 20 bp, Artificial Sequence
  Chr5q_9 Reverse Primer
aggcaacaaaatgatgcaga

SEQ ID NO: 5705 - DNA, 19 bp, Artificial Sequence
  Chr5q_9 Reverse Primer
ggcttttgcaggagttgct

SEQ ID NO: 5706 - DNA, 26 bp, Artificial Sequence
  Chr5q_9 Reverse Primer
caaaatttgtagaggcaagataattc

SEQ ID NO: 5707 - DNA, 20 bp, Artificial Sequence
  Chr5q_9 Reverse Primer
gggcctcagaaactgaagag

SEQ ID NO: 5708 - DNA, 20 bp, Artificial Sequence
  Chr5q_9 Reverse Primer
ttggaaaaggtcattcctcg

SEQ ID NO: 5709 - DNA, 20 bp, Artificial Sequence
  Chr5q_9 Reverse Primer
ttggttgcgctctgtagttg

SEQ ID NO: 5710 - DNA, 22 bp, Artificial Sequence
  Chr5q_9 Reverse Primer
tcagcaaatctttgatgctttc

SEQ ID NO: 5711 - DNA, 20 bp, Artificial Sequence
  Chr5q_9 Reverse Primer
cccattcttcccagacacat

SEQ ID NO: 5712 - DNA, 20 bp, Artificial Sequence
  Chr5q_9 Reverse Primer
aagcaaaggctctcattgga

SEQ ID NO: 5713 - DNA, 20 bp, Artificial Sequence
  Chr5q_9 Reverse Primer
ttgggctctgaggaaacact

SEQ ID NO: 5714 - DNA, 26 bp, Artificial Sequence
  Chr5q_9 Reverse Primer
attaatacgttttatcgaaatccaga

SEQ ID NO: 5715 - DNA, 19 bp, Artificial Sequence
  Chr5q_9 Reverse Primer
caccagtgcctgtgctctt

SEQ ID NO: 5716 - DNA, 20 bp, Artificial Sequence
  Chr5q_9 Reverse Primer
cagggatgtcagagtcagca

SEQ ID NO: 5717 - DNA, 20 bp, Artificial Sequence
  Chr5q_9 Reverse Primer
gttgtaggtgccagaagcct

SEQ ID NO: 5718 - DNA, 24 bp, Artificial Sequence
  Chr5q_9 Reverse Primer
cataattttcaattcccattctga

SEQ ID NO: 5719 - DNA, 21 bp, Artificial Sequence
  Chr5q_9 Reverse Primer
ccaggcctcggaagattatta

SEQ ID NO: 5720 - DNA, 20 bp, Artificial Sequence
  Chr5q_9 Reverse Primer
tgttaatggtttaggcctgc

SEQ ID NO: 5721 - DNA, 20 bp, Artificial Sequence
  Chr5q_9 Reverse Primer
acattttgggtgccattcat

SEQ ID NO: 5722 - DNA, 21 bp, Artificial Sequence
  Chr5q_9 Reverse Primer
tgcaggattgctatgatgaaa

SEQ ID NO: 5723 - DNA, 21 bp, Artificial Sequence
  Chr5q_9 Reverse Primer
agacgtggattttaaccctgg

SEQ ID NO: 5724 - DNA, 20 bp, Artificial Sequence
  Chr5q_9 Reverse Primer
atggctttgttgcttgatcc

SEQ ID NO: 5725 - DNA, 20 bp, Artificial Sequence
  Chr5q_9 Reverse Primer
catattgcccagctttccat

SEQ ID NO: 5726 - DNA, 23 bp, Artificial Sequence
  Chr5q_9 Reverse Primer
gaagaaaaagccacaataaatgc

SEQ ID NO: 5727 - DNA, 27 bp, Artificial Sequence
  Chr5q_9 Reverse Primer
aaggagttaacagaagtgttatctgtg

SEQ ID NO: 5728 - DNA, 20 bp, Artificial Sequence
  Chr5q_9 Reverse Primer
tgtttctgaacaccttggca

SEQ ID NO: 5729 - DNA, 20 bp, Artificial Sequence
  Chr5q_9 Reverse Primer
ggaccccgacctaaaatgta

SEQ ID NO: 5730 - DNA, 22 bp, Artificial Sequence
  Chr5q_9 Reverse Primer
ttacatttcttcaattggctgc

SEQ ID NO: 5731 - DNA, 20 bp, Artificial Sequence
  Chr5q_9 Reverse Primer
tgcgttttgaagagactgga

SEQ ID NO: 5732 - DNA, 20 bp, Artificial Sequence
  Chr5q_9 Reverse Primer
ttgcacaattgttgctaccc

SEQ ID NO: 5733 - DNA, 20 bp, Artificial Sequence
  Chr5q_9 Reverse Primer
ttggggaaagccaagtacag

SEQ ID NO: 5734 - DNA, 21 bp, Artificial Sequence
  Chr5q_9 Reverse Primer
tccagatgatgaatacgcaaa

SEQ ID NO: 5735 - DNA, 20 bp, Artificial Sequence
  Chr5q_9 Reverse Primer
ggaacgagatattccaggca

SEQ ID NO: 5736 - DNA, 20 bp, Artificial Sequence
  Chr5q_9 Reverse Primer
agacgttgtgcatgtgtcct

SEQ ID NO: 5737 - DNA, 20 bp, Artificial Sequence
  Chr5q_9 Reverse Primer
ggaattgtgcggaaaaagaa

SEQ ID NO: 5738 - DNA, 20 bp, Artificial Sequence
  Chr5q_9 Reverse Primer
acagacaccagaagggccta

SEQ ID NO: 5739 - DNA, 20 bp, Artificial Sequence
  Chr5q_9 Reverse Primer
atcactccatttccttcccc

SEQ ID NO: 5740 - DNA, 20 bp, Artificial Sequence
  Chr5q_9 Reverse Primer
aggggacagtcaatccagtg

SEQ ID NO: 5741 - DNA, 21 bp, Artificial Sequence
  Chr5q_9 Reverse Primer
gctggaatgtgtttgtcacct

SEQ ID NO: 5742 - DNA, 20 bp, Artificial Sequence
  Chr5q_9 Reverse Primer
attgccaaacaaaagcaagc

SEQ ID NO: 5743 - DNA, 22 bp, Artificial Sequence
  Chr5q_9 Reverse Primer
tttttccaaacttaggacagca

SEQ ID NO: 5744 - DNA, 22 bp, Artificial Sequence
  Chr5q_9 Reverse Primer
tgtgaaacaaaacaaaatgcaa

SEQ ID NO: 5745 - DNA, 24 bp, Artificial Sequence
  Chr5q_9 Reverse Primer
ttcagtgtgatagcatgtgttgtt

SEQ ID NO: 5746 - DNA, 21 bp, Artificial Sequence
  Chr5q_9 Reverse Primer
tgcatttagtgataggcctgc

SEQ ID NO: 5747 - DNA, 22 bp, Artificial Sequence
  Chr5q_9 Reverse Primer
tttgcttatatttgcttgctgc

SEQ ID NO: 5748 - DNA, 24 bp, Artificial Sequence
  Chr5q_9 Reverse Primer
tttttatccctccctttattatca

SEQ ID NO: 5749 - DNA, 20 bp, Artificial Sequence
  Chr5q_9 Reverse Primer
tggtgccatgctattgaaaa

SEQ ID NO: 5750 - DNA, 20 bp, Artificial Sequence
  Chr5q_9 Reverse Primer
tatacccaccacttggtccc

SEQ ID NO: 5751 - DNA, 23 bp, Artificial Sequence
  Chr5q_9 Reverse Primer
gcggattacctaacattgtaacc

SEQ ID NO: 5752 - DNA, 20 bp, Artificial Sequence
  Chr5q_9 Reverse Primer
ttccagacaccggattatca

SEQ ID NO: 5753 - DNA, 20 bp, Artificial Sequence
  Chr5q_9 Reverse Primer
ttgttggtctgctcttgtgc

SEQ ID NO: 5754 - DNA, 26 bp, Artificial Sequence
  Chr5q_9 Reverse Primer
aggcacatactataatcttcaaacaa

SEQ ID NO: 5755 - DNA, 20 bp, Artificial Sequence
  Chr5q_9 Reverse Primer
ggcagccacttctcttgaac

SEQ ID NO: 5756 - DNA, 20 bp, Artificial Sequence
  Chr5q_9 Reverse Primer
ggcaaggatggatgagagag

SEQ ID NO: 5757 - DNA, 21 bp, Artificial Sequence
  Chr5q_9 Reverse Primer
ttgagaactgctgaactgctg

SEQ ID NO: 5758 - DNA, 21 bp, Artificial Sequence
  Chr5q_9 Reverse Primer
ggtttaggcatgttcagttgg

SEQ ID NO: 5759 - DNA, 20 bp, Artificial Sequence
  Chr5q_9 Reverse Primer
ggattgagaaaaggcccata

SEQ ID NO: 5760 - DNA, 20 bp, Artificial Sequence
  Chr5q_9 Reverse Primer
tggttgtcagaagtgtccca

SEQ ID NO: 5761 - DNA, 20 bp, Artificial Sequence
  Chr5q_9 Reverse Primer
tgttggttcgggtcctttac

SEQ ID NO: 5762 - DNA, 24 bp, Artificial Sequence
  Chr5q_9 Reverse Primer
aaatgttctatgaagaagcagtgg

SEQ ID NO: 5763 - DNA, 20 bp, Artificial Sequence
  Chr5q_9 Reverse Primer
atgcagtggtgaaccagaca

SEQ ID NO: 5764 - DNA, 26 bp, Artificial Sequence
  Chr5q_9 Reverse Primer
gaattcattttaacaacacaaatcca

SEQ ID NO: 5765 - DNA, 23 bp, Artificial Sequence
  Chr5q_9 Reverse Primer
cacctattactgtgggctagtca

SEQ ID NO: 5766 - DNA, 21 bp, Artificial Sequence
  Chr5q_9 Reverse Primer
tgatgcttgtttttgtgacct

SEQ ID NO: 5767 - DNA, 23 bp, Artificial Sequence
  Chr5q_9 Reverse Primer
tgaattcatcaatcaggacaaca

SEQ ID NO: 5768 - DNA, 21 bp, Artificial Sequence
  Chr5q_9 Reverse Primer
tggaatcactgatgttagcca

SEQ ID NO: 5769 - DNA, 20 bp, Artificial Sequence
  Chr5q_9 Reverse Primer
caggtgccatatcagagcaa

SEQ ID NO: 5770 - DNA, 20 bp, Artificial Sequence
  Chr5q_9 Reverse Primer
atggatttccgtcttagggc

SEQ ID NO: 5771 - DNA, 20 bp, Artificial Sequence
  Chr5q_9 Reverse Primer
tgcagctatgctgtgaaacc

SEQ ID NO: 5772 - DNA, 20 bp, Artificial Sequence
  Chr5q_9 Reverse Primer
tcgagttgcagaacagcgta

SEQ ID NO: 5773 - DNA, 20 bp, Artificial Sequence
  Chr5q_9 Reverse Primer
tttgtgcacattactgccct

SEQ ID NO: 5774 - DNA, 20 bp, Artificial Sequence
  Chr5q_9 Reverse Primer
actgggcttccagataccct

SEQ ID NO: 5775 - DNA, 20 bp, Artificial Sequence
  Chr5q_9 Reverse Primer
aacgaaaaacagtgtgcagc

SEQ ID NO: 5776 - DNA, 20 bp, Artificial Sequence
  Chr5q_9 Reverse Primer
tgtattttgctttctgggga

SEQ ID NO: 5777 - DNA, 20 bp, Artificial Sequence
  Chr5q_10 Forward Primer
atgtaagggggttcattgcc

SEQ ID NO: 5778 - DNA, 20 bp, Artificial Sequence
  Chr5q_10 Forward Primer
cctgtggaataggtctggga

SEQ ID NO: 5779 - DNA, 20 bp, Artificial Sequence
  Chr5q_10 Forward Primer
cagcctcatcagtcctgtca

SEQ ID NO: 5780 - DNA, 20 bp, Artificial Sequence
  Chr5q_10 Forward Primer
tcaggtcccccaactgatag

SEQ ID NO: 5781 - DNA, 20 bp, Artificial Sequence
  Chr5q_10 Forward Primer
ccaatctcttccctgctctg

SEQ ID NO: 5782 - DNA, 20 bp, Artificial Sequence
  Chr5q_10 Forward Primer
gacaacaggggaggaaatca

SEQ ID NO: 5783 - DNA, 27 bp, Artificial Sequence
  Chr5q_10 Forward Primer
cattatgttatacccttaagatttggg

SEQ ID NO: 5784 - DNA, 20 bp, Artificial Sequence
  Chr5q_10 Forward Primer
cccccattgtatcctgtgtc

SEQ ID NO: 5785 - DNA, 20 bp, Artificial Sequence
  Chr5q_10 Forward Primer
aagcaaaaccccaggaaagt

SEQ ID NO: 5786 - DNA, 20 bp, Artificial Sequence
  Chr5q_10 Forward Primer
gggagacagggaacaaaagg

SEQ ID NO: 5787 - DNA, 20 bp, Artificial Sequence
  Chr5q_10 Forward Primer
ttaaggacaactggcccaac

SEQ ID NO: 5788 - DNA, 20 bp, Artificial Sequence
  Chr5q_10 Forward Primer
ggcaaatagttttgggggat

SEQ ID NO: 5789 - DNA, 20 bp, Artificial Sequence
  Chr5q_10 Forward Primer
ggggaaggaggtgattatga

SEQ ID NO: 5790 - DNA, 20 bp, Artificial Sequence
  Chr5q_10 Forward Primer
acctagagggaagccaaagc

SEQ ID NO: 5791 - DNA, 20 bp, Artificial Sequence
  Chr5q_10 Forward Primer
tcagccaagaatcccgtaac

SEQ ID NO: 5792 - DNA, 20 bp, Artificial Sequence
  Chr5q_10 Forward Primer
tcaaacttcttggcatggtg

SEQ ID NO: 5793 - DNA, 20 bp, Artificial Sequence
  Chr5q_10 Forward Primer
ctgcagggaagaggaacaag

SEQ ID NO: 5794 - DNA, 20 bp, Artificial Sequence
  Chr5q_10 Forward Primer
aagaagcaagcagcttccag

SEQ ID NO: 5795 - DNA, 24 bp, Artificial Sequence
  Chr5q_10 Forward Primer
ccagaaaactaagcaaatgaaaaa

SEQ ID NO: 5796 - DNA, 23 bp, Artificial Sequence
  Chr5q_10 Forward Primer
tgcctaaaattgacagatgaaga

SEQ ID NO: 5797 - DNA, 22 bp, Artificial Sequence
  Chr5q_10 Forward Primer
tttgaaaccaatcagaaattca

SEQ ID NO: 5798 - DNA, 20 bp, Artificial Sequence
  Chr5q_10 Forward Primer
acaccaaatgagcagtgcag

SEQ ID NO: 5799 - DNA, 22 bp, Artificial Sequence
  Chr5q_10 Forward Primer
tggctgcttctgtcattaagat

SEQ ID NO: 5800 - DNA, 20 bp, Artificial Sequence
  Chr5q_10 Forward Primer
gcaactggtagctgtgatgg

SEQ ID NO: 5801 - DNA, 20 bp, Artificial Sequence
  Chr5q_10 Forward Primer
acgggtaaaaaccccaattc

SEQ ID NO: 5802 - DNA, 20 bp, Artificial Sequence
  Chr5q_10 Forward Primer
cattcccagcacttagcaca

SEQ ID NO: 5803 - DNA, 20 bp, Artificial Sequence
  Chr5q_10 Forward Primer
gtatggcttgaagacctcgg

SEQ ID NO: 5804 - DNA, 20 bp, Artificial Sequence
  Chr5q_10 Forward Primer
ttcccagttctctccatgct

SEQ ID NO: 5805 - DNA, 21 bp, Artificial Sequence
  Chr5q_10 Forward Primer
ggtattccaggctgaaaaagg

SEQ ID NO: 5806 - DNA, 20 bp, Artificial Sequence
  Chr5q_10 Forward Primer
atgcagaggaggaacacacc

SEQ ID NO: 5807 - DNA, 20 bp, Artificial Sequence
  Chr5q_10 Forward Primer
agaccgtaatgcaggaccag

SEQ ID NO: 5808 - DNA, 20 bp, Artificial Sequence
  Chr5q_10 Forward Primer
ctcagctctcccggtatctg

SEQ ID NO: 5809 - DNA, 19 bp, Artificial Sequence
  Chr5q_10 Forward Primer
ccaggcgtaccggatagac

SEQ ID NO: 5810 - DNA, 20 bp, Artificial Sequence
  Chr5q_10 Forward Primer
ccgcatccttctctgttctt

SEQ ID NO: 5811 - DNA, 20 bp, Artificial Sequence
  Chr5q_10 Forward Primer
gtgcgggagtactgagagga

SEQ ID NO: 5812 - DNA, 20 bp, Artificial Sequence
  Chr5q_10 Forward Primer
tgtttcagatcctgaggacg

SEQ ID NO: 5813 - DNA, 20 bp, Artificial Sequence
  Chr5q_10 Forward Primer
gtgagtgaggagcctggaac

SEQ ID NO: 5814 - DNA, 20 bp, Artificial Sequence
  Chr5q_10 Forward Primer
tgcttccttgccaatctctt

SEQ ID NO: 5815 - DNA, 18 bp, Artificial Sequence
  Chr5q_10 Forward Primer
tgcagctgtccaggtgag

SEQ ID NO: 5816 - DNA, 20 bp, Artificial Sequence
  Chr5q_10 Forward Primer
ccactcctttgggttaagca

SEQ ID NO: 5817 - DNA, 20 bp, Artificial Sequence
  Chr5q_10 Forward Primer
gacaggggagaccactgtgt

SEQ ID NO: 5818 - DNA, 20 bp, Artificial Sequence
  Chr5q_10 Forward Primer
cacattgagaagcgctatgg

SEQ ID NO: 5819 - DNA, 20 bp, Artificial Sequence
  Chr5q_10 Forward Primer
agccaagcaaaccagacact

SEQ ID NO: 5820 - DNA, 22 bp, Artificial Sequence
  Chr5q_10 Forward Primer
actatttaagcctttcggctcc

SEQ ID NO: 5821 - DNA, 20 bp, Artificial Sequence
  Chr5q_10 Forward Primer
tggagttgcacagtctcagg

SEQ ID NO: 5822 - DNA, 20 bp, Artificial Sequence
  Chr5q_10 Forward Primer
accttgatggatggtttcca

SEQ ID NO: 5823 - DNA, 20 bp, Artificial Sequence
  Chr5q_10 Forward Primer
tgcagacaaaacaggactgg

SEQ ID NO: 5824 - DNA, 21 bp, Artificial Sequence
  Chr5q_10 Forward Primer
tgtcctcaacatttattgggc

SEQ ID NO: 5825 - DNA, 20 bp, Artificial Sequence
  Chr5q_10 Forward Primer
ggaggacaccgtgagagaag

SEQ ID NO: 5826 - DNA, 20 bp, Artificial Sequence
  Chr5q_10 Forward Primer
aagtgctctccaccaagcaa

SEQ ID NO: 5827 - DNA, 20 bp, Artificial Sequence
  Chr5q_10 Forward Primer
tcctctcatcccatctccag

SEQ ID NO: 5828 - DNA, 20 bp, Artificial Sequence
  Chr5q_10 Forward Primer
cccccaaactcctatgaagg

SEQ ID NO: 5829 - DNA, 20 bp, Artificial Sequence
  Chr5q_10 Forward Primer
aaattctcccctccagaagc

SEQ ID NO: 5830 - DNA, 20 bp, Artificial Sequence
  Chr5q_10 Forward Primer
tgtcactgtcttggctgctc

SEQ ID NO: 5831 - DNA, 20 bp, Artificial Sequence
  Chr5q_10 Forward Primer
actcaccctccgtgattgtc

SEQ ID NO: 5832 - DNA, 20 bp, Artificial Sequence
  Chr5q_10 Forward Primer
atgtgccaggtacaatgcaa

SEQ ID NO: 5833 - DNA, 20 bp, Artificial Sequence
  Chr5q_10 Forward Primer
gagctcacggttggagagag

SEQ ID NO: 5834 - DNA, 20 bp, Artificial Sequence
  Chr5q_10 Forward Primer
ctgcttctcccttccttcct

SEQ ID NO: 5835 - DNA, 20 bp, Artificial Sequence
  Chr5q_10 Forward Primer
gctccaagatcccctctctc

SEQ ID NO: 5836 - DNA, 20 bp, Artificial Sequence
  Chr5q_10 Forward Primer
cctccaaggacaaggacaaa

SEQ ID NO: 5837 - DNA, 20 bp, Artificial Sequence
  Chr5q_10 Forward Primer
ccaggctcctgaagaaacag

SEQ ID NO: 5838 - DNA, 20 bp, Artificial Sequence
  Chr5q_10 Forward Primer
tgaccagggcctagagagaa

SEQ ID NO: 5839 - DNA, 20 bp, Artificial Sequence
  Chr5q_10 Forward Primer
atctggggttcggaagagtt

SEQ ID NO: 5840 - DNA, 20 bp, Artificial Sequence
  Chr5q_10 Forward Primer
ccaattgagaagccagatcc

SEQ ID NO: 5841 - DNA, 20 bp, Artificial Sequence
  Chr5q_10 Forward Primer
gactgtgagggcaggaactc

SEQ ID NO: 5842 - DNA, 20 bp, Artificial Sequence
  Chr5q_10 Forward Primer
tgcacctatgttccaaacca

SEQ ID NO: 5843 - DNA, 20 bp, Artificial Sequence
  Chr5q_10 Forward Primer
cccatacagcttccgacttc

SEQ ID NO: 5844 - DNA, 20 bp, Artificial Sequence
  Chr5q_10 Forward Primer
acagcttcatgagaccaccc

SEQ ID NO: 5845 - DNA, 19 bp, Artificial Sequence
  Chr5q_10 Forward Primer
cttcatccccacaggttcc

SEQ ID NO: 5846 - DNA, 20 bp, Artificial Sequence
  Chr5q_10 Forward Primer
gcatctgctcttgaccacaa

SEQ ID NO: 5847 - DNA, 20 bp, Artificial Sequence
  Chr5q_10 Forward Primer
ggactgatgggagtccttga

SEQ ID NO: 5848 - DNA, 20 bp, Artificial Sequence
  Chr5q_10 Forward Primer
ctttgagggagggttcctgt

SEQ ID NO: 5849 - DNA, 20 bp, Artificial Sequence
  Chr5q_10 Forward Primer
gaaggatgctcagctgttcc

SEQ ID NO: 5850 - DNA, 20 bp, Artificial Sequence
  Chr5q_10 Forward Primer
attcagggccaagctcactt

SEQ ID NO: 5851 - DNA, 19 bp, Artificial Sequence
  Chr5q_10 Forward Primer
aaccccaggcatctgagtc

SEQ ID NO: 5852 - DNA, 20 bp, Artificial Sequence
  Chr5q_10 Forward Primer
cttaactggaaaagccagcg

SEQ ID NO: 5853 - DNA, 20 bp, Artificial Sequence
  Chr5q_10 Forward Primer
atgtgccttctcctacccct

SEQ ID NO: 5854 - DNA, 20 bp, Artificial Sequence
  Chr5q_10 Forward Primer
ctgtctgctcactgtgctcc

SEQ ID NO: 5855 - DNA, 20 bp, Artificial Sequence
  Chr5q_10 Forward Primer
tctctcatggaacccctacg

SEQ ID NO: 5856 - DNA, 20 bp, Artificial Sequence
  Chr5q_10 Forward Primer
cagaggaagctgcaacagtg

SEQ ID NO: 5857 - DNA, 20 bp, Artificial Sequence
  Chr5q_10 Forward Primer
ctttcctcaggatgaggctg

SEQ ID NO: 5858 - DNA, 20 bp, Artificial Sequence
  Chr5q_10 Forward Primer
ctcttgctcctccacagacc

SEQ ID NO: 5859 - DNA, 20 bp, Artificial Sequence
  Chr5q_10 Forward Primer
atgaggaaaacagcacaccc

SEQ ID NO: 5860 - DNA, 20 bp, Artificial Sequence
  Chr5q_10 Forward Primer
gcaaggtcagaggaggaatg

SEQ ID NO: 5861 - DNA, 20 bp, Artificial Sequence
  Chr5q_10 Forward Primer
tggggtgatcagaatggaat

SEQ ID NO: 5862 - DNA, 20 bp, Artificial Sequence
  Chr5q_10 Forward Primer
agaaaactcacggtgttggg

SEQ ID NO: 5863 - DNA, 20 bp, Artificial Sequence
  Chr5q_10 Forward Primer
cagtcatggctcctctccat

SEQ ID NO: 5864 - DNA, 20 bp, Artificial Sequence
  Chr5q_10 Forward Primer
ggaggctcacctgtgaagag

SEQ ID NO: 5865 - DNA, 20 bp, Artificial Sequence
  Chr5q_10 Forward Primer
ctcccttcacaaagcacaca

SEQ ID NO: 5866 - DNA, 20 bp, Artificial Sequence
  Chr5q_10 Forward Primer
cagacattcaaggccatgtg

SEQ ID NO: 5867 - DNA, 20 bp, Artificial Sequence
  Chr5q_10 Forward Primer
ttctggccttaatcactggg

SEQ ID NO: 5868 - DNA, 20 bp, Artificial Sequence
  Chr5q_10 Forward Primer
tgggcaaaagaggaagagaa

SEQ ID NO: 5869 - DNA, 20 bp, Artificial Sequence
  Chr5q_10 Forward Primer
gctcgcgaatctcaaaagtc

SEQ ID NO: 5870 - DNA, 20 bp, Artificial Sequence
  Chr5q_10 Forward Primer
caaagtcagagggttcctcg

SEQ ID NO: 5871 - DNA, 20 bp, Artificial Sequence
  Chr5q_10 Forward Primer
ctgccccattcaggagacta

SEQ ID NO: 5872 - DNA, 20 bp, Artificial Sequence
  Chr5q_10 Forward Primer
agagtctctgggtcctgcaa

SEQ ID NO: 5873 - DNA, 22 bp, Artificial Sequence
  Chr5q_10 Reverse Primer
cagtttgtgtggtttttggttt

SEQ ID NO: 5874 - DNA, 20 bp, Artificial Sequence
  Chr5q_10 Reverse Primer
ctttcaataggcttgctggg

SEQ ID NO: 5875 - DNA, 20 bp, Artificial Sequence
  Chr5q_10 Reverse Primer
aggggtaaaaggcagctagg

SEQ ID NO: 5876 - DNA, 20 bp, Artificial Sequence
  Chr5q_10 Reverse Primer
ggtcagcagctcagaaaagc

SEQ ID NO: 5877 - DNA, 20 bp, Artificial Sequence
  Chr5q_10 Reverse Primer
gctggttggtttcaggacat

SEQ ID NO: 5878 - DNA, 20 bp, Artificial Sequence
  Chr5q_10 Reverse Primer
tgctcctttcaggcaatacc

SEQ ID NO: 5879 - DNA, 20 bp, Artificial Sequence
  Chr5q_10 Reverse Primer
actacaaaggcgtgagcacc

SEQ ID NO: 5880 - DNA, 20 bp, Artificial Sequence
  Chr5q_10 Reverse Primer
cagggttccctagatggtca

SEQ ID NO: 5881 - DNA, 20 bp, Artificial Sequence
  Chr5q_10 Reverse Primer
cttttccagccggttatcaa

SEQ ID NO: 5882 - DNA, 20 bp, Artificial Sequence
  Chr5q_10 Reverse Primer
gggaccatgaatctctggaa

SEQ ID NO: 5883 - DNA, 20 bp, Artificial Sequence
  Chr5q_10 Reverse Primer
taccaccacccacttcccta

SEQ ID NO: 5884 - DNA, 20 bp, Artificial Sequence
  Chr5q_10 Reverse Primer
tcagcctcattgtttccctc

SEQ ID NO: 5885 - DNA, 20 bp, Artificial Sequence
  Chr5q_10 Reverse Primer
tttctacctcactgaccggg

SEQ ID NO: 5886 - DNA, 20 bp, Artificial Sequence
  Chr5q_10 Reverse Primer
cagccttctctgcatatccc

SEQ ID NO: 5887 - DNA, 20 bp, Artificial Sequence
  Chr5q_10 Reverse Primer
ggtgatgggaaagacagtgg

SEQ ID NO: 5888 - DNA, 20 bp, Artificial Sequence
  Chr5q_10 Reverse Primer
catctctgcaaggagcaacc

SEQ ID NO: 5889 - DNA, 20 bp, Artificial Sequence
  Chr5q_10 Reverse Primer
tttacttcccatccagtgcc

SEQ ID NO: 5890 - DNA, 20 bp, Artificial Sequence
  Chr5q_10 Reverse Primer
tgtgctacaggcttttcgtg

SEQ ID NO: 5891 - DNA, 20 bp, Artificial Sequence
  Chr5q_10 Reverse Primer
acaccatcacattggcttcc

SEQ ID NO: 5892 - DNA, 20 bp, Artificial Sequence
  Chr5q_10 Reverse Primer
acccctatgaagcagggtct

SEQ ID NO: 5893 - DNA, 20 bp, Artificial Sequence
  Chr5q_10 Reverse Primer
tgaatacagggtcagccctt

SEQ ID NO: 5894 - DNA, 20 bp, Artificial Sequence
  Chr5q_10 Reverse Primer
actcattaggctggcattgg

SEQ ID NO: 5895 - DNA, 20 bp, Artificial Sequence
  Chr5q_10 Reverse Primer
aagggttgctggtaaatcca

SEQ ID NO: 5896 - DNA, 20 bp, Artificial Sequence
  Chr5q_10 Reverse Primer
tcttaagagggctatgggca

SEQ ID NO: 5897 - DNA, 20 bp, Artificial Sequence
  Chr5q_10 Reverse Primer
gaaagatggttggagggtga

SEQ ID NO: 5898 - DNA, 20 bp, Artificial Sequence
  Chr5q_10 Reverse Primer
ttcaacgtaggcgatgactg

SEQ ID NO: 5899 - DNA, 20 bp, Artificial Sequence
  Chr5q_10 Reverse Primer
cttcagggggctcatttgta

SEQ ID NO: 5900 - DNA, 20 bp, Artificial Sequence
  Chr5q_10 Reverse Primer
tgtgtgcattttctgggaga

SEQ ID NO: 5901 - DNA, 20 bp, Artificial Sequence
  Chr5q_10 Reverse Primer
tggcctcaggaattagggtt

SEQ ID NO: 5902 - DNA, 20 bp, Artificial Sequence
  Chr5q_10 Reverse Primer
agagtatcggggagctggat

SEQ ID NO: 5903 - DNA, 20 bp, Artificial Sequence
  Chr5q_10 Reverse Primer
cgtggcctatttctacgacc

SEQ ID NO: 5904 - DNA, 19 bp, Artificial Sequence
  Chr5q_10 Reverse Primer
acctttgagggacggagtg

SEQ ID NO: 5905 - DNA, 18 bp, Artificial Sequence
  Chr5q_10 Reverse Primer
ggcttcccaaatgccttc

SEQ ID NO: 5906 - DNA, 20 bp, Artificial Sequence
  Chr5q_10 Reverse Primer
gtgatttggttctggttccg

SEQ ID NO: 5907 - DNA, 20 bp, Artificial Sequence
  Chr5q_10 Reverse Primer
agctctctaccacgaccctg

SEQ ID NO: 5908 - DNA, 20 bp, Artificial Sequence
  Chr5q_10 Reverse Primer
ggcagatcatgaagcctacc

SEQ ID NO: 5909 - DNA, 20 bp, Artificial Sequence
  Chr5q_10 Reverse Primer
gcccaagactaccatccaga

SEQ ID NO: 5910 - DNA, 20 bp, Artificial Sequence
  Chr5q_10 Reverse Primer
catctccttcaaggcctcag

SEQ ID NO: 5911 - DNA, 21 bp, Artificial Sequence
  Chr5q_10 Reverse Primer
ggtgaatgttaggcttgatga

SEQ ID NO: 5912 - DNA, 20 bp, Artificial Sequence
  Chr5q_10 Reverse Primer
gaggaggggagtgagggtaa

SEQ ID NO: 5913 - DNA, 20 bp, Artificial Sequence
  Chr5q_10 Reverse Primer
ttggtggctacttccctctg

SEQ ID NO: 5914 - DNA, 20 bp, Artificial Sequence
  Chr5q_10 Reverse Primer
tgtccctgagtcctccattc

SEQ ID NO: 5915 - DNA, 20 bp, Artificial Sequence
  Chr5q_10 Reverse Primer
ctcatttagggctcaggcag

SEQ ID NO: 5916 - DNA, 20 bp, Artificial Sequence
  Chr5q_10 Reverse Primer
gctggtagtccatcagcaca

SEQ ID NO: 5917 - DNA, 20 bp, Artificial Sequence
  Chr5q_10 Reverse Primer
tcttgtgctaagagggcagg

SEQ ID NO: 5918 - DNA, 20 bp, Artificial Sequence
  Chr5q_10 Reverse Primer
aagctggaatcgcccttatt

SEQ ID NO: 5919 - DNA, 20 bp, Artificial Sequence
  Chr5q_10 Reverse Primer
tgccactgtcctaagtgctg

SEQ ID NO: 5920 - DNA, 20 bp, Artificial Sequence
  Chr5q_10 Reverse Primer
tccctggagttaccaccatc

SEQ ID NO: 5921 - DNA, 20 bp, Artificial Sequence
  Chr5q_10 Reverse Primer
catctccaagtgtgtggtgg

SEQ ID NO: 5922 - DNA, 20 bp, Artificial Sequence
  Chr5q_10 Reverse Primer
ccttctcctcccagcttctc

SEQ ID NO: 5923 - DNA, 20 bp, Artificial Sequence
  Chr5q_10 Reverse Primer
acctcatggggtagtggtga

SEQ ID NO: 5924 - DNA, 20 bp, Artificial Sequence
  Chr5q_10 Reverse Primer
gccacctgaactctctgacc

SEQ ID NO: 5925 - DNA, 20 bp, Artificial Sequence
  Chr5q_10 Reverse Primer
tgttaggggttgtagccctg

SEQ ID NO: 5926 - DNA, 20 bp, Artificial Sequence
  Chr5q_10 Reverse Primer
ctctgtggcctccatagacc

SEQ ID NO: 5927 - DNA, 20 bp, Artificial Sequence
  Chr5q_10 Reverse Primer
gaatgtgaggagacgggaga

SEQ ID NO: 5928 - DNA, 20 bp, Artificial Sequence
  Chr5q_10 Reverse Primer
aagtagggttctggggcagt

SEQ ID NO: 5929 - DNA, 20 bp, Artificial Sequence
  Chr5q_10 Reverse Primer
cgtcagccaggttccactaa

SEQ ID NO: 5930 - DNA, 20 bp, Artificial Sequence
  Chr5q_10 Reverse Primer
caggtactgcaacgactgga

SEQ ID NO: 5931 - DNA, 20 bp, Artificial Sequence
  Chr5q_10 Reverse Primer
cattcaggtgtgtgtcctgg

SEQ ID NO: 5932 - DNA, 20 bp, Artificial Sequence
  Chr5q_10 Reverse Primer
cagaactccagctcacctcc

SEQ ID NO: 5933 - DNA, 20 bp, Artificial Sequence
  Chr5q_10 Reverse Primer
gtggcctctaagagcttccc

SEQ ID NO: 5934 - DNA, 20 bp, Artificial Sequence
  Chr5q_10 Reverse Primer
cactagtggggctcaaagga

SEQ ID NO: 5935 - DNA, 20 bp, Artificial Sequence
  Chr5q_10 Reverse Primer
ggccagttttaacccagaca

SEQ ID NO: 5936 - DNA, 20 bp, Artificial Sequence
  Chr5q_10 Reverse Primer
aagcgcttgaaaagaggtca

SEQ ID NO: 5937 - DNA, 20 bp, Artificial Sequence
  Chr5q_10 Reverse Primer
aggctctcctacttcctggg

SEQ ID NO: 5938 - DNA, 20 bp, Artificial Sequence
  Chr5q_10 Reverse Primer
ctgggcctgactctgatctc

SEQ ID NO: 5939 - DNA, 20 bp, Artificial Sequence
  Chr5q_10 Reverse Primer
gtgacctagcagggggtaca

SEQ ID NO: 5940 - DNA, 20 bp, Artificial Sequence
  Chr5q_10 Reverse Primer
aaggcacgtgagctgtaggt

SEQ ID NO: 5941 - DNA, 20 bp, Artificial Sequence
  Chr5q_10 Reverse Primer
atattctgccagttggggtg

SEQ ID NO: 5942 - DNA, 20 bp, Artificial Sequence
  Chr5q_10 Reverse Primer
tgaggatgggagaacaggac

SEQ ID NO: 5943 - DNA, 20 bp, Artificial Sequence
  Chr5q_10 Reverse Primer
ccttagggcagaatccctct

SEQ ID NO: 5944 - DNA, 20 bp, Artificial Sequence
  Chr5q_10 Reverse Primer
cactcaccttcgtcgttgtg

SEQ ID NO: 5945 - DNA, 20 bp, Artificial Sequence
  Chr5q_10 Reverse Primer
ttgtggtaggagacgggaag

SEQ ID NO: 5946 - DNA, 20 bp, Artificial Sequence
  Chr5q_10 Reverse Primer
gtttagtttctcggtggccc

SEQ ID NO: 5947 - DNA, 20 bp, Artificial Sequence
  Chr5q_10 Reverse Primer
cagccctctcttcgtcagat

SEQ ID NO: 5948 - DNA, 20 bp, Artificial Sequence
  Chr5q_10 Reverse Primer
tgaggaggatgaggaattgg

SEQ ID NO: 5949 - DNA, 20 bp, Artificial Sequence
  Chr5q_10 Reverse Primer
tgctgtgtgaacagtgggtt

SEQ ID NO: 5950 - DNA, 20 bp, Artificial Sequence
  Chr5q_10 Reverse Primer
agatggtctttggatgggtg

SEQ ID NO: 5951 - DNA, 20 bp, Artificial Sequence
  Chr5q_10 Reverse Primer
ctaaaggcttcagtggctgc

SEQ ID NO: 5952 - DNA, 19 bp, Artificial Sequence
  Chr5q_10 Reverse Primer
gaagtccttcccagccatc

SEQ ID NO: 5953 - DNA, 20 bp, Artificial Sequence
  Chr5q_10 Reverse Primer
ggagtggacagtgaagccag

SEQ ID NO: 5954 - DNA, 20 bp, Artificial Sequence
  Chr5q_10 Reverse Primer
aacccctttgcattcagttg

SEQ ID NO: 5955 - DNA, 20 bp, Artificial Sequence
  Chr5q_10 Reverse Primer
acccctgtctcctgttgcta

SEQ ID NO: 5956 - DNA, 20 bp, Artificial Sequence
  Chr5q_10 Reverse Primer
ctgcactgacgaggatgaaa

SEQ ID NO: 5957 - DNA, 18 bp, Artificial Sequence
  Chr5q_10 Reverse Primer
cccctgccctttctgact

SEQ ID NO: 5958 - DNA, 20 bp, Artificial Sequence
  Chr5q_10 Reverse Primer
cgacttctgtgaccctgtga

SEQ ID NO: 5959 - DNA, 20 bp, Artificial Sequence
  Chr5q_10 Reverse Primer
tctatgcccaggtatccgac

SEQ ID NO: 5960 - DNA, 20 bp, Artificial Sequence
  Chr5q_10 Reverse Primer
tgagagctgggggcttagta

SEQ ID NO: 5961 - DNA, 20 bp, Artificial Sequence
  Chr5q_10 Reverse Primer
tagcatggcttgctcttcct

SEQ ID NO: 5962 - DNA, 20 bp, Artificial Sequence
  Chr5q_10 Reverse Primer
accactaaaatgtgtggccc

SEQ ID NO: 5963 - DNA, 20 bp, Artificial Sequence
  Chr5q_10 Reverse Primer
tatctggcccacatctctcc

SEQ ID NO: 5964 - DNA, 20 bp, Artificial Sequence
  Chr5q_10 Reverse Primer
tgtggttgtgtggtcaaggt

SEQ ID NO: 5965 - DNA, 20 bp, Artificial Sequence
  Chr5q_10 Reverse Primer
gtgtcaccctgaaggttggt

SEQ ID NO: 5966 - DNA, 20 bp, Artificial Sequence
  Chr5q_10 Reverse Primer
tgtagcgagtggcagagaga

SEQ ID NO: 5967 - DNA, 20 bp, Artificial Sequence
  Chr5q_10 Reverse Primer
cttagctcttctggcctcca

SEQ ID NO: 5968 - DNA, 20 bp, Artificial Sequence
  Chr5q_10 Reverse Primer
aatgtgcggctctaaaccag

SEQ ID NO: 5969 - DNA, 19 bp, Artificial Sequence
  Chr5q_11 Forward Primer
ctggtctctgccagtagcg

SEQ ID NO: 5970 - DNA, 21 bp, Artificial Sequence
  Chr5q_11 Forward Primer
aaccaaggagctctgagactt

SEQ ID NO: 5971 - DNA, 20 bp, Artificial Sequence
  Chr5q_11 Forward Primer
gcctgactgatactgtcccc

SEQ ID NO: 5972 - DNA, 20 bp, Artificial Sequence
  Chr5q_11 Forward Primer
catttgcaatgctcacacct

SEQ ID NO: 5973 - DNA, 26 bp, Artificial Sequence
  Chr5q_11 Forward Primer
tgataactacttgcatttctcctttc

SEQ ID NO: 5974 - DNA, 20 bp, Artificial Sequence
  Chr5q_11 Forward Primer
ggccagcaaacatatggaga

SEQ ID NO: 5975 - DNA, 20 bp, Artificial Sequence
  Chr5q_11 Forward Primer
ctgtgcaggtcctgagtctg

SEQ ID NO: 5976 - DNA, 20 bp, Artificial Sequence
  Chr5q_11 Forward Primer
tagcagataggccccagaga

SEQ ID NO: 5977 - DNA, 20 bp, Artificial Sequence
  Chr5q_11 Forward Primer
gcaaagaccaaccaatgaca

SEQ ID NO: 5978 - DNA, 20 bp, Artificial Sequence
  Chr5q_11 Forward Primer
tccctaggttccaggctttt

SEQ ID NO: 5979 - DNA, 20 bp, Artificial Sequence
  Chr5q_11 Forward Primer
aacagtgcagttccagaggg

SEQ ID NO: 5980 - DNA, 20 bp, Artificial Sequence
  Chr5q_11 Forward Primer
gtttggcagtgggtgactct

SEQ ID NO: 5981 - DNA, 20 bp, Artificial Sequence
  Chr5q_11 Forward Primer
taacggtagcagaggttggg

SEQ ID NO: 5982 - DNA, 22 bp, Artificial Sequence
  Chr5q_11 Forward Primer
tctggaaatcctacttgaggga

SEQ ID NO: 5983 - DNA, 20 bp, Artificial Sequence
  Chr5q_11 Forward Primer
acctgggagagtccaggttt

SEQ ID NO: 5984 - DNA, 20 bp, Artificial Sequence
  Chr5q_11 Forward Primer
cattgcagtcctgtagccaa

SEQ ID NO: 5985 - DNA, 20 bp, Artificial Sequence
  Chr5q_11 Forward Primer
tgctgggacacaacaaccta

SEQ ID NO: 5986 - DNA, 22 bp, Artificial Sequence
  Chr5q_11 Forward Primer
aaaaattgatttgaagtgggga

SEQ ID NO: 5987 - DNA, 20 bp, Artificial Sequence
  Chr5q_11 Forward Primer
tatgagggaggaagctccag

SEQ ID NO: 5988 - DNA, 20 bp, Artificial Sequence
  Chr5q_11 Forward Primer
cggtccaagtcattttccat

SEQ ID NO: 5989 - DNA, 20 bp, Artificial Sequence
  Chr5q_11 Forward Primer
gccctcccactgtgtagaag

SEQ ID NO: 5990 - DNA, 20 bp, Artificial Sequence
  Chr5q_11 Forward Primer
ccgtacggaacagtacagca

SEQ ID NO: 5991 - DNA, 20 bp, Artificial Sequence
  Chr5q_11 Forward Primer
tctggtgctgataatggtgg

SEQ ID NO: 5992 - DNA, 20 bp, Artificial Sequence
  Chr5q_11 Forward Primer
cccaggaaggcagtttctaa

SEQ ID NO: 5993 - DNA, 20 bp, Artificial Sequence
  Chr5q_11 Forward Primer
ccgattcaccaactccactt

SEQ ID NO: 5994 - DNA, 20 bp, Artificial Sequence
  Chr5q_11 Forward Primer
tgttacttccctttgcccac

SEQ ID NO: 5995 - DNA, 20 bp, Artificial Sequence
  Chr5q_11 Forward Primer
ttagcaccttgtctccaggc

SEQ ID NO: 5996 - DNA, 20 bp, Artificial Sequence
  Chr5q_11 Forward Primer
gtgctaacgcttgaggaagg

SEQ ID NO: 5997 - DNA, 20 bp, Artificial Sequence
  Chr5q_11 Forward Primer
ctcatccagggcgatgtact

SEQ ID NO: 5998 - DNA, 20 bp, Artificial Sequence
  Chr5q_11 Forward Primer
aaaaagccagaatcccaggt

SEQ ID NO: 5999 - DNA, 20 bp, Artificial Sequence
  Chr5q_11 Forward Primer
gtcaacgggagctctaacca

SEQ ID NO: 6000 - DNA, 20 bp, Artificial Sequence
  Chr5q_11 Forward Primer
aacctctagacctcgcagcc

SEQ ID NO: 6001 - DNA, 20 bp, Artificial Sequence
  Chr5q_11 Forward Primer
ctccagatgttcccctttga

SEQ ID NO: 6002 - DNA, 20 bp, Artificial Sequence
  Chr5q_11 Forward Primer
tgatgctctgcttccacaac

SEQ ID NO: 6003 - DNA, 20 bp, Artificial Sequence
  Chr5q_11 Forward Primer
gacaagagccctcaaactgg

SEQ ID NO: 6004 - DNA, 20 bp, Artificial Sequence
  Chr5q_11 Forward Primer
cacgcctagtacttgcagga

SEQ ID NO: 6005 - DNA, 20 bp, Artificial Sequence
  Chr5q_11 Forward Primer
gtcttacccgtcaatggggt

SEQ ID NO: 6006 - DNA, 20 bp, Artificial Sequence
  Chr5q_11 Forward Primer
ggaatgggactggatcttca

SEQ ID NO: 6007 - DNA, 20 bp, Artificial Sequence
  Chr5q_11 Forward Primer
ctccaggccacagtttcttc

SEQ ID NO: 6008 - DNA, 20 bp, Artificial Sequence
  Chr5q_11 Forward Primer
aaagtcccctctgtgaggct

SEQ ID NO: 6009 - DNA, 20 bp, Artificial Sequence
  Chr5q_11 Forward Primer
ttctgcaccctgtacacctg

SEQ ID NO: 6010 - DNA, 21 bp, Artificial Sequence
  Chr5q_11 Forward Primer
ggcatgcccttattttaaagc

SEQ ID NO: 6011 - DNA, 20 bp, Artificial Sequence
  Chr5q_11 Forward Primer
ccagaaagtgccctgaactc

SEQ ID NO: 6012 - DNA, 20 bp, Artificial Sequence
  Chr5q_11 Forward Primer
aagtggcaggaagagtcgaa

SEQ ID NO: 6013 - DNA, 24 bp, Artificial Sequence
  Chr5q_11 Forward Primer
ttacgatccagctgtatatcctga

SEQ ID NO: 6014 - DNA, 20 bp, Artificial Sequence
  Chr5q_11 Forward Primer
gagaactgatgggcactggt

SEQ ID NO: 6015 - DNA, 20 bp, Artificial Sequence
  Chr5q_11 Forward Primer
tgagacctgaaaaggttcgg

SEQ ID NO: 6016 - DNA, 20 bp, Artificial Sequence
  Chr5q_11 Forward Primer
accaccaagccaacagtttc

SEQ ID NO: 6017 - DNA, 20 bp, Artificial Sequence
  Chr5q_11 Forward Primer
gggagttagcatcacctgga

SEQ ID NO: 6018 - DNA, 20 bp, Artificial Sequence
  Chr5q_11 Forward Primer
gttcctgggtctccattgaa

SEQ ID NO: 6019 - DNA, 20 bp, Artificial Sequence
  Chr5q_11 Forward Primer
caagggtctgccatcttcat

SEQ ID NO: 6020 - DNA, 20 bp, Artificial Sequence
  Chr5q_11 Forward Primer
ctcaggacctcgtttccttg

SEQ ID NO: 6021 - DNA, 20 bp, Artificial Sequence
  Chr5q_11 Forward Primer
gccacagtttcccacttgtt

SEQ ID NO: 6022 - DNA, 20 bp, Artificial Sequence
  Chr5q_11 Forward Primer
ggacaggattagctcccaca

SEQ ID NO: 6023 - DNA, 20 bp, Artificial Sequence
  Chr5q_11 Forward Primer
gaaggtttgggaagcattca

SEQ ID NO: 6024 - DNA, 20 bp, Artificial Sequence
  Chr5q_11 Forward Primer
tgctgctgttggaaagagaa

SEQ ID NO: 6025 - DNA, 25 bp, Artificial Sequence
  Chr5q_11 Forward Primer
gatttagcttggaaaagtatttctg

SEQ ID NO: 6026 - DNA, 20 bp, Artificial Sequence
  Chr5q_11 Forward Primer
aacacacaactttgaggccc

SEQ ID NO: 6027 - DNA, 20 bp, Artificial Sequence
  Chr5q_11 Forward Primer
cagccagattggctctcatt

SEQ ID NO: 6028 - DNA, 20 bp, Artificial Sequence
  Chr5q_11 Forward Primer
accacccctaccagaaatcc

SEQ ID NO: 6029 - DNA, 20 bp, Artificial Sequence
  Chr5q_11 Forward Primer
gtacttacaggggctgccaa

SEQ ID NO: 6030 - DNA, 19 bp, Artificial Sequence
  Chr5q_11 Forward Primer
gctcagagcttccacagga

SEQ ID NO: 6031 - DNA, 20 bp, Artificial Sequence
  Chr5q_11 Forward Primer
ccagatgcttccatgtgttg

SEQ ID NO: 6032 - DNA, 20 bp, Artificial Sequence
  Chr5q_11 Forward Primer
ctgcagccacaaagaacaaa

SEQ ID NO: 6033 - DNA, 20 bp, Artificial Sequence
  Chr5q_11 Forward Primer
aagacaccccaagcacattc

SEQ ID NO: 6034 - DNA, 20 bp, Artificial Sequence
  Chr5q_11 Forward Primer
ccttttggaagacgcaagat

SEQ ID NO: 6035 - DNA, 20 bp, Artificial Sequence
  Chr5q_11 Forward Primer
ttctgtctgtcctgcctcct

SEQ ID NO: 6036 - DNA, 20 bp, Artificial Sequence
  Chr5q_11 Forward Primer
caagcgttctcactcatgga

SEQ ID NO: 6037 - DNA, 20 bp, Artificial Sequence
  Chr5q_11 Forward Primer
agggaagcggctgaactatt

SEQ ID NO: 6038 - DNA, 20 bp, Artificial Sequence
  Chr5q_11 Forward Primer
accaaggcctagaggaaagg

SEQ ID NO: 6039 - DNA, 20 bp, Artificial Sequence
  Chr5q_11 Forward Primer
tccgtacatcgagtcccttc

SEQ ID NO: 6040 - DNA, 20 bp, Artificial Sequence
  Chr5q_11 Forward Primer
tggagtaatgcaacccaaca

SEQ ID NO: 6041 - DNA, 20 bp, Artificial Sequence
  Chr5q_11 Forward Primer
aagtccgaggttcccagaat

SEQ ID NO: 6042 - DNA, 20 bp, Artificial Sequence
  Chr5q_11 Forward Primer
gctggtaaacaagcccaaag

SEQ ID NO: 6043 - DNA, 20 bp, Artificial Sequence
  Chr5q_11 Forward Primer
aagtggagtggagctgagga

SEQ ID NO: 6044 - DNA, 20 bp, Artificial Sequence
  Chr5q_11 Forward Primer
tcagaggtggctccagagtt

SEQ ID NO: 6045 - DNA, 20 bp, Artificial Sequence
  Chr5q_11 Forward Primer
acctctgtgtgctgcctctt

SEQ ID NO: 6046 - DNA, 20 bp, Artificial Sequence
  Chr5q_11 Forward Primer
ttcaggattgaggttgggag

SEQ ID NO: 6047 - DNA, 20 bp, Artificial Sequence
  Chr5q_11 Forward Primer
gccagcttgctatgtgacct

SEQ ID NO: 6048 - DNA, 20 bp, Artificial Sequence
  Chr5q_11 Forward Primer
gggtgcctgttgatgaaatc

SEQ ID NO: 6049 - DNA, 20 bp, Artificial Sequence
  Chr5q_11 Forward Primer
tttcttttcaactgggggtg

SEQ ID NO: 6050 - DNA, 21 bp, Artificial Sequence
  Chr5q_11 Forward Primer
cacaagaagttccccaaatca

SEQ ID NO: 6051 - DNA, 20 bp, Artificial Sequence
  Chr5q_11 Forward Primer
ggcacagccagagctaaaac

SEQ ID NO: 6052 - DNA, 20 bp, Artificial Sequence
  Chr5q_11 Forward Primer
gttgattccttctccaggca

SEQ ID NO: 6053 - DNA, 20 bp, Artificial Sequence
  Chr5q_11 Forward Primer
tgcctctctgttcccttttg

SEQ ID NO: 6054 - DNA, 20 bp, Artificial Sequence
  Chr5q_11 Forward Primer
cctcccattacacccatgtc

SEQ ID NO: 6055 - DNA, 20 bp, Artificial Sequence
  Chr5q_11 Forward Primer
gattcccaggaaaggaggag

SEQ ID NO: 6056 - DNA, 20 bp, Artificial Sequence
  Chr5q_11 Forward Primer
gggggtcacacatacctcag

SEQ ID NO: 6057 - DNA, 20 bp, Artificial Sequence
  Chr5q_11 Forward Primer
tgacccagaacagcctcttt

SEQ ID NO: 6058 - DNA, 20 bp, Artificial Sequence
  Chr5q_11 Forward Primer
ggacctgtgccaccagtatt

SEQ ID NO: 6059 - DNA, 20 bp, Artificial Sequence
  Chr5q_11 Forward Primer
gcacagttcatcgccttaca

SEQ ID NO: 6060 - DNA, 21 bp, Artificial Sequence
  Chr5q_11 Forward Primer
tcttttactagggttccagcc

SEQ ID NO: 6061 - DNA, 20 bp, Artificial Sequence
  Chr5q_11 Forward Primer
cctctcaccctggttcaaaa

SEQ ID NO: 6062 - DNA, 20 bp, Artificial Sequence
  Chr5q_11 Forward Primer
ccaagcacctgctaagctct

SEQ ID NO: 6063 - DNA, 20 bp, Artificial Sequence
  Chr5q_11 Forward Primer
ctctccaaccactctccagc

SEQ ID NO: 6064 - DNA, 20 bp, Artificial Sequence
  Chr5q_11 Forward Primer
ccgtgagctcatttcaggtt

SEQ ID NO: 6065 - DNA, 20 bp, Artificial Sequence
  Chr5q_11 Reverse Primer
gcacaaacccaaaccacttt

SEQ ID NO: 6066 - DNA, 21 bp, Artificial Sequence
  Chr5q_11 Reverse Primer
aacaggcaaccaaaagataca

SEQ ID NO: 6067 - DNA, 20 bp, Artificial Sequence
  Chr5q_11 Reverse Primer
tggagccactcatactgtcg

SEQ ID NO: 6068 - DNA, 20 bp, Artificial Sequence
  Chr5q_11 Reverse Primer
tggagcagaagtcataccca

SEQ ID NO: 6069 - DNA, 26 bp, Artificial Sequence
  Chr5q_11 Reverse Primer
atattcttggtaataaacctttgcca

SEQ ID NO: 6070 - DNA, 22 bp, Artificial Sequence
  Chr5q_11 Reverse Primer
tgcaagataatgccacactttt

SEQ ID NO: 6071 - DNA, 20 bp, Artificial Sequence
  Chr5q_11 Reverse Primer
acctgagaggagaaggggag

SEQ ID NO: 6072 - DNA, 20 bp, Artificial Sequence
  Chr5q_11 Reverse Primer
cctgcccttttcactcaaca

SEQ ID NO: 6073 - DNA, 20 bp, Artificial Sequence
  Chr5q_11 Reverse Primer
ttcagaagaaccctgatggg

SEQ ID NO: 6074 - DNA, 20 bp, Artificial Sequence
  Chr5q_11 Reverse Primer
gttcccgaacaactttcacc

SEQ ID NO: 6075 - DNA, 20 bp, Artificial Sequence
  Chr5q_11 Reverse Primer
gcaatctgtgcaaacaggaa

SEQ ID NO: 6076 - DNA, 23 bp, Artificial Sequence
  Chr5q_11 Reverse Primer
cagaagcaaatatggacaaatgg

SEQ ID NO: 6077 - DNA, 20 bp, Artificial Sequence
  Chr5q_11 Reverse Primer
cataggtcagggcttctcca

SEQ ID NO: 6078 - DNA, 20 bp, Artificial Sequence
  Chr5q_11 Reverse Primer
gagccattagctggtgaagc

SEQ ID NO: 6079 - DNA, 20 bp, Artificial Sequence
  Chr5q_11 Reverse Primer
aaaggagtcctggacagggt

SEQ ID NO: 6080 - DNA, 22 bp, Artificial Sequence
  Chr5q_11 Reverse Primer
catcatcaactaccactcccaa

SEQ ID NO: 6081 - DNA, 20 bp, Artificial Sequence
  Chr5q_11 Reverse Primer
ttcattgaggaggagttggc

SEQ ID NO: 6082 - DNA, 21 bp, Artificial Sequence
  Chr5q_11 Reverse Primer
aaaatcagcatcaaagagcca

SEQ ID NO: 6083 - DNA, 20 bp, Artificial Sequence
  Chr5q_11 Reverse Primer
tccttcaggtaggtgggaga

SEQ ID NO: 6084 - DNA, 20 bp, Artificial Sequence
  Chr5q_11 Reverse Primer
ttcagcattggctcattcag

SEQ ID NO: 6085 - DNA, 20 bp, Artificial Sequence
  Chr5q_11 Reverse Primer
tgagctggggttttgagact

SEQ ID NO: 6086 - DNA, 20 bp, Artificial Sequence
  Chr5q_11 Reverse Primer
actggggacacagttatggc

SEQ ID NO: 6087 - DNA, 22 bp, Artificial Sequence
  Chr5q_11 Reverse Primer
ctgacacaaaaacacatgagca

SEQ ID NO: 6088 - DNA, 20 bp, Artificial Sequence
  Chr5q_11 Reverse Primer
ctccttttcttcaccctccc

SEQ ID NO: 6089 - DNA, 20 bp, Artificial Sequence
  Chr5q_11 Reverse Primer
ggttcaaacttttgggagca

SEQ ID NO: 6090 - DNA, 20 bp, Artificial Sequence
  Chr5q_11 Reverse Primer
ccatttgtagctttgcccat

SEQ ID NO: 6091 - DNA, 20 bp, Artificial Sequence
  Chr5q_11 Reverse Primer
tccttgggaagtgcgttatc

SEQ ID NO: 6092 - DNA, 20 bp, Artificial Sequence
  Chr5q_11 Reverse Primer
ctgaacaaagaagcaagggg

SEQ ID NO: 6093 - DNA, 19 bp, Artificial Sequence
  Chr5q_11 Reverse Primer
ctctggggcaggctaactc

SEQ ID NO: 6094 - DNA, 20 bp, Artificial Sequence
  Chr5q_11 Reverse Primer
ccccagttctcagccaatta

SEQ ID NO: 6095 - DNA, 20 bp, Artificial Sequence
  Chr5q_11 Reverse Primer
ttccctggagatcctttgtg

SEQ ID NO: 6096 - DNA, 20 bp, Artificial Sequence
  Chr5q_11 Reverse Primer
aacagcacatctgggaaagg

SEQ ID NO: 6097 - DNA, 20 bp, Artificial Sequence
  Chr5q_11 Reverse Primer
tctaggatgttcacccctcg

SEQ ID NO: 6098 - DNA, 20 bp, Artificial Sequence
  Chr5q_11 Reverse Primer
tgcactattctaggcagggg

SEQ ID NO: 6099 - DNA, 20 bp, Artificial Sequence
  Chr5q_11 Reverse Primer
aggagtaccaggctccaagg

SEQ ID NO: 6100 - DNA, 20 bp, Artificial Sequence
  Chr5q_11 Reverse Primer
gctatggccagaaagcctct

SEQ ID NO: 6101 - DNA, 20 bp, Artificial Sequence
  Chr5q_11 Reverse Primer
ccgactggtccagacaatct

SEQ ID NO: 6102 - DNA, 20 bp, Artificial Sequence
  Chr5q_11 Reverse Primer
gcccttgtgtttggaaccta

SEQ ID NO: 6103 - DNA, 20 bp, Artificial Sequence
  Chr5q_11 Reverse Primer
ggttgacgtgaacaacatgg

SEQ ID NO: 6104 - DNA, 20 bp, Artificial Sequence
  Chr5q_11 Reverse Primer
gtagaaaaggagggttgggg

SEQ ID NO: 6105 - DNA, 20 bp, Artificial Sequence
  Chr5q_11 Reverse Primer
ccagggtgtggtctgatctt

SEQ ID NO: 6106 - DNA, 20 bp, Artificial Sequence
  Chr5q_11 Reverse Primer
tggaaggtcaacatcaggga

SEQ ID NO: 6107 - DNA, 20 bp, Artificial Sequence
  Chr5q_11 Reverse Primer
aaatgtgagtgtccttgggc

SEQ ID NO: 6108 - DNA, 20 bp, Artificial Sequence
  Chr5q_11 Reverse Primer
ccaaaaagtggatttgtggc

SEQ ID NO: 6109 - DNA, 23 bp, Artificial Sequence
  Chr5q_11 Reverse Primer
gtacggacaggatgttcaacaca

SEQ ID NO: 6110 - DNA, 20 bp, Artificial Sequence
  Chr5q_11 Reverse Primer
ctgctcctgcctaccatcat

SEQ ID NO: 6111 - DNA, 20 bp, Artificial Sequence
  Chr5q_11 Reverse Primer
ggatcttttcagcaaccagc

SEQ ID NO: 6112 - DNA, 20 bp, Artificial Sequence
  Chr5q_11 Reverse Primer
tacagatccctgccagaacc

SEQ ID NO: 6113 - DNA, 19 bp, Artificial Sequence
  Chr5q_11 Reverse Primer
cccagaagtgcctgacctc

SEQ ID NO: 6114 - DNA, 20 bp, Artificial Sequence
  Chr5q_11 Reverse Primer
acctcatccggtgtttacca

SEQ ID NO: 6115 - DNA, 20 bp, Artificial Sequence
  Chr5q_11 Reverse Primer
tgctatccatgcgttagtgc

SEQ ID NO: 6116 - DNA, 20 bp, Artificial Sequence
  Chr5q_11 Reverse Primer
cctcatagctctttgccctg

SEQ ID NO: 6117 - DNA, 20 bp, Artificial Sequence
  Chr5q_11 Reverse Primer
gtgcagaggaaaccgaagag

SEQ ID NO: 6118 - DNA, 20 bp, Artificial Sequence
  Chr5q_11 Reverse Primer
cctggtgacctctaaggcag

SEQ ID NO: 6119 - DNA, 20 bp, Artificial Sequence
  Chr5q_11 Reverse Primer
ggaagaaactgtggcagagg

SEQ ID NO: 6120 - DNA, 20 bp, Artificial Sequence
  Chr5q_11 Reverse Primer
atgggagctgcttgagtgtt

SEQ ID NO: 6121 - DNA, 20 bp, Artificial Sequence
  Chr5q_11 Reverse Primer
tccaagttgaaatggcaaga

SEQ ID NO: 6122 - DNA, 20 bp, Artificial Sequence
  Chr5q_11 Reverse Primer
ctggaagccttcacaaggag

SEQ ID NO: 6123 - DNA, 20 bp, Artificial Sequence
  Chr5q_11 Reverse Primer
gggaaggaggggaagataca

SEQ ID NO: 6124 - DNA, 20 bp, Artificial Sequence
  Chr5q_11 Reverse Primer
cgggataaaaactgggatga

SEQ ID NO: 6125 - DNA, 21 bp, Artificial Sequence
  Chr5q_11 Reverse Primer
ccaacctcctcatgtttttca

SEQ ID NO: 6126 - DNA, 21 bp, Artificial Sequence
  Chr5q_11 Reverse Primer
gcccatcaccttagttgaatc

SEQ ID NO: 6127 - DNA, 20 bp, Artificial Sequence
  Chr5q_11 Reverse Primer
aatgtctccaccacagagcc

SEQ ID NO: 6128 - DNA, 20 bp, Artificial Sequence
  Chr5q_11 Reverse Primer
gaccccctggcatttaattt

SEQ ID NO: 6129 - DNA, 20 bp, Artificial Sequence
  Chr5q_11 Reverse Primer
cccccaggtcctttacattt

SEQ ID NO: 6130 - DNA, 20 bp, Artificial Sequence
  Chr5q_11 Reverse Primer
tccagtcctagctgggctat

SEQ ID NO: 6131 - DNA, 20 bp, Artificial Sequence
  Chr5q_11 Reverse Primer
ctgtctgcctacttcccagc

SEQ ID NO: 6132 - DNA, 20 bp, Artificial Sequence
  Chr5q_11 Reverse Primer
agtgctcttggactggtggt

SEQ ID NO: 6133 - DNA, 20 bp, Artificial Sequence
  Chr5q_11 Reverse Primer
ttgattggcaaaggatcaca

SEQ ID NO: 6134 - DNA, 20 bp, Artificial Sequence
  Chr5q_11 Reverse Primer
gaactcaggccagttcaagg

SEQ ID NO: 6135 - DNA, 20 bp, Artificial Sequence
  Chr5q_11 Reverse Primer
tggctttttaacgtccaagg

SEQ ID NO: 6136 - DNA, 20 bp, Artificial Sequence
  Chr5q_11 Reverse Primer
gattggcctcagtccttttg

SEQ ID NO: 6137 - DNA, 20 bp, Artificial Sequence
  Chr5q_11 Reverse Primer
ctggtatcagctgcccaagt

SEQ ID NO: 6138 - DNA, 20 bp, Artificial Sequence
  Chr5q_11 Reverse Primer
ctgagctgctgtgtctgctc

SEQ ID NO: 6139 - DNA, 20 bp, Artificial Sequence
  Chr5q_11 Reverse Primer
aagtggaagcagggagtcaa

SEQ ID NO: 6140 - DNA, 20 bp, Artificial Sequence
  Chr5q_11 Reverse Primer
cagatgcaatagcctggaca

SEQ ID NO: 6141 - DNA, 20 bp, Artificial Sequence
  Chr5q_11 Reverse Primer
atctggggatcactctgggt

SEQ ID NO: 6142 - DNA, 20 bp, Artificial Sequence
  Chr5q_11 Reverse Primer
acgtggctttgtcattaggc

SEQ ID NO: 6143 - DNA, 20 bp, Artificial Sequence
  Chr5q_11 Reverse Primer
tacaaacacacaccgccact

SEQ ID NO: 6144 - DNA, 20 bp, Artificial Sequence
  Chr5q_11 Reverse Primer
agcagctttccttgctgaaa

SEQ ID NO: 6145 - DNA, 20 bp, Artificial Sequence
  Chr5q_11 Reverse Primer
agtgcctgacattgggaaag

SEQ ID NO: 6146 - DNA, 20 bp, Artificial Sequence
  Chr5q_11 Reverse Primer
ttccctcataatgcaaaggg

SEQ ID NO: 6147 - DNA, 20 bp, Artificial Sequence
  Chr5q_11 Reverse Primer
tttttcagggtctctgcctg

SEQ ID NO: 6148 - DNA, 20 bp, Artificial Sequence
  Chr5q_11 Reverse Primer
atggattagagggcatgacg

SEQ ID NO: 6149 - DNA, 20 bp, Artificial Sequence
  Chr5q_11 Reverse Primer
cttccgtaatccacccaaga

SEQ ID NO: 6150 - DNA, 20 bp, Artificial Sequence
  Chr5q_11 Reverse Primer
ctcactcccaaacaccacct

SEQ ID NO: 6151 - DNA, 20 bp, Artificial Sequence
  Chr5q_11 Reverse Primer
gcctgttgcttttcagaagg

SEQ ID NO: 6152 - DNA, 20 bp, Artificial Sequence
  Chr5q_11 Reverse Primer
ctatgggagaaggaggaggc

SEQ ID NO: 6153 - DNA, 20 bp, Artificial Sequence
  Chr5q_11 Reverse Primer
tgcctttgtggcaaatacaa

SEQ ID NO: 6154 - DNA, 20 bp, Artificial Sequence
  Chr5q_11 Reverse Primer
accactttttgccaggtgat

SEQ ID NO: 6155 - DNA, 20 bp, Artificial Sequence
  Chr5q_11 Reverse Primer
gggcaagtcggaagttcata

SEQ ID NO: 6156 - DNA, 20 bp, Artificial Sequence
  Chr5q_11 Reverse Primer
aacatactactgcacccggc

SEQ ID NO: 6157 - DNA, 20 bp, Artificial Sequence
  Chr5q_11 Reverse Primer
ccactggttcatcctcatca

SEQ ID NO: 6158 - DNA, 20 bp, Artificial Sequence
  Chr5q_11 Reverse Primer
agttgagggggaagtagcgt

SEQ ID NO: 6159 - DNA, 20 bp, Artificial Sequence
  Chr5q_11 Reverse Primer
gcctgatgcaaagcacaata

SEQ ID NO: 6160 - DNA, 20 bp, Artificial Sequence
  Chr5q_11 Reverse Primer
cctcacatcagggttttggt

SEQ ID NO: 6161 - DNA, 20 bp, Artificial Sequence
  Chr5q_12 Forward Primer
cccccaacagtcctaaaggt

SEQ ID NO: 6162 - DNA, 20 bp, Artificial Sequence
  Chr5q_12 Forward Primer
taggatgcatggcacagttc

SEQ ID NO: 6163 - DNA, 20 bp, Artificial Sequence
  Chr5q_12 Forward Primer
gccactgcttgaagaggaaa

SEQ ID NO: 6164 - DNA, 25 bp, Artificial Sequence
  Chr5q_12 Forward Primer
ccttgagacaggtatagtttcttgc

SEQ ID NO: 6165 - DNA, 20 bp, Artificial Sequence
  Chr5q_12 Forward Primer
gggagggaaaagcatagggt

SEQ ID NO: 6166 - DNA, 20 bp, Artificial Sequence
  Chr5q_12 Forward Primer
cccatggagctctgaagatg

SEQ ID NO: 6167 - DNA, 20 bp, Artificial Sequence
  Chr5q_12 Forward Primer
agcataagggaaatttgggg

SEQ ID NO: 6168 - DNA, 20 bp, Artificial Sequence
  Chr5q_12 Forward Primer
cagtggcccaagaaaatcat

SEQ ID NO: 6169 - DNA, 22 bp, Artificial Sequence
  Chr5q_12 Forward Primer
aagaaagcatgtcaaatcctca

SEQ ID NO: 6170 - DNA, 20 bp, Artificial Sequence
  Chr5q_12 Forward Primer
atgggccattcactagttcg

SEQ ID NO: 6171 - DNA, 23 bp, Artificial Sequence
  Chr5q_12 Forward Primer
tcccttgctattgaaatctgttc

SEQ ID NO: 6172 - DNA, 20 bp, Artificial Sequence
  Chr5q_12 Forward Primer
aggagttgcctccctccata

SEQ ID NO: 6173 - DNA, 20 bp, Artificial Sequence
  Chr5q_12 Forward Primer
gcttcttctctgagtccccc

SEQ ID NO: 6174 - DNA, 25 bp, Artificial Sequence
  Chr5q_12 Forward Primer
cattttatttgtactcttgctctga

SEQ ID NO: 6175 - DNA, 20 bp, Artificial Sequence
  Chr5q_12 Forward Primer
tgccagaagacaatgctcag

SEQ ID NO: 6176 - DNA, 20 bp, Artificial Sequence
  Chr5q_12 Forward Primer
gggaaaccaaaggcagaaat

SEQ ID NO: 6177 - DNA, 20 bp, Artificial Sequence
  Chr5q_12 Forward Primer
tcatgaaccgattaccccat

SEQ ID NO: 6178 - DNA, 20 bp, Artificial Sequence
  Chr5q_12 Forward Primer
gcattgtgtcacctctgagc

SEQ ID NO: 6179 - DNA, 20 bp, Artificial Sequence
  Chr5q_12 Forward Primer
tgaaacagctattccctgcc

SEQ ID NO: 6180 - DNA, 24 bp, Artificial Sequence
  Chr5q_12 Forward Primer
aaaagagtgtattttggcatcaga

SEQ ID NO: 6181 - DNA, 20 bp, Artificial Sequence
  Chr5q_12 Forward Primer
ctccgtaagccctctccttt

SEQ ID NO: 6182 - DNA, 20 bp, Artificial Sequence
  Chr5q_12 Forward Primer
tatgatagcccattccaccc

SEQ ID NO: 6183 - DNA, 24 bp, Artificial Sequence
  Chr5q_12 Forward Primer
gacatttgtgttagcaatgaatga

SEQ ID NO: 6184 - DNA, 20 bp, Artificial Sequence
  Chr5q_12 Forward Primer
gcaagggcttctgtttttga

SEQ ID NO: 6185 - DNA, 23 bp, Artificial Sequence
  Chr5q_12 Forward Primer
tctgcttaacttgtttggagagg

SEQ ID NO: 6186 - DNA, 21 bp, Artificial Sequence
  Chr5q_12 Forward Primer
tctgcttacctttttggctca

SEQ ID NO: 6187 - DNA, 20 bp, Artificial Sequence
  Chr5q_12 Forward Primer
gaggagcctgctcaagaaaa

SEQ ID NO: 6188 - DNA, 20 bp, Artificial Sequence
  Chr5q_12 Forward Primer
ccaggaactggaatggagag

SEQ ID NO: 6189 - DNA, 20 bp, Artificial Sequence
  Chr5q_12 Forward Primer
ctcagagcaagtgtgttgcc

SEQ ID NO: 6190 - DNA, 21 bp, Artificial Sequence
  Chr5q_12 Forward Primer
tgcagagcctttagcacattt

SEQ ID NO: 6191 - DNA, 23 bp, Artificial Sequence
  Chr5q_12 Forward Primer
gcatatcccattgaaaacacttc

SEQ ID NO: 6192 - DNA, 24 bp, Artificial Sequence
  Chr5q_12 Forward Primer
atttgtgttgcttgctttaactcc

SEQ ID NO: 6193 - DNA, 20 bp, Artificial Sequence
  Chr5q_12 Forward Primer
ggtgccaagtttgctctttc

SEQ ID NO: 6194 - DNA, 20 bp, Artificial Sequence
  Chr5q_12 Forward Primer
caaatttgccaaacggaagt

SEQ ID NO: 6195 - DNA, 27 bp, Artificial Sequence
  Chr5q_12 Forward Primer
gatattgctaggtctatcacattcttt

SEQ ID NO: 6196 - DNA, 25 bp, Artificial Sequence
  Chr5q_12 Forward Primer
cagggataaatatagggttctctgg

SEQ ID NO: 6197 - DNA, 20 bp, Artificial Sequence
  Chr5q_12 Forward Primer
ttaattggctgccatgtgtc

SEQ ID NO: 6198 - DNA, 20 bp, Artificial Sequence
  Chr5q_12 Forward Primer
acatttctgcatgaggagcc

SEQ ID NO: 6199 - DNA, 20 bp, Artificial Sequence
  Chr5q_12 Forward Primer
ctcaatcagcaagatgccaa

SEQ ID NO: 6200 - DNA, 20 bp, Artificial Sequence
  Chr5q_12 Forward Primer
ttccacgtgagaaggaaaca

SEQ ID NO: 6201 - DNA, 20 bp, Artificial Sequence
  Chr5q_12 Forward Primer
ccctggctgtgcattattct

SEQ ID NO: 6202 - DNA, 20 bp, Artificial Sequence
  Chr5q_12 Forward Primer
cagtcggatcctggacaact

SEQ ID NO: 6203 - DNA, 23 bp, Artificial Sequence
  Chr5q_12 Forward Primer
tgggtatatgatcaatgtttgcc

SEQ ID NO: 6204 - DNA, 20 bp, Artificial Sequence
  Chr5q_12 Forward Primer
acccaaggatccccactact

SEQ ID NO: 6205 - DNA, 20 bp, Artificial Sequence
  Chr5q_12 Forward Primer
ggctccagattcatgacaca

SEQ ID NO: 6206 - DNA, 20 bp, Artificial Sequence
  Chr5q_12 Forward Primer
aggtcatttggaaaggctga

SEQ ID NO: 6207 - DNA, 20 bp, Artificial Sequence
  Chr5q_12 Forward Primer
tcgtgttctaagccactcca

SEQ ID NO: 6208 - DNA, 23 bp, Artificial Sequence
  Chr5q_12 Forward Primer
accctctttagaatagtcacggt

SEQ ID NO: 6209 - DNA, 20 bp, Artificial Sequence
  Chr5q_12 Forward Primer
caaggtggaggagggaagtt

SEQ ID NO: 6210 - DNA, 20 bp, Artificial Sequence
  Chr5q_12 Forward Primer
tgagaggttgaagtttgggg

SEQ ID NO: 6211 - DNA, 20 bp, Artificial Sequence
  Chr5q_12 Forward Primer
ctatggatgggcatgcttgt

SEQ ID NO: 6212 - DNA, 22 bp, Artificial Sequence
  Chr5q_12 Forward Primer
gacaactcgtcaaattcactgc

SEQ ID NO: 6213 - DNA, 20 bp, Artificial Sequence
  Chr5q_12 Forward Primer
gcatgctgttttgcagtgat

SEQ ID NO: 6214 - DNA, 20 bp, Artificial Sequence
  Chr5q_12 Forward Primer
tgcaaaggaagatgggctac

SEQ ID NO: 6215 - DNA, 22 bp, Artificial Sequence
  Chr5q_12 Forward Primer
gcatgtaaatccatgaaagcaa

SEQ ID NO: 6216 - DNA, 20 bp, Artificial Sequence
  Chr5q_12 Forward Primer
tccagtgtttttcctgggtt

SEQ ID NO: 6217 - DNA, 23 bp, Artificial Sequence
  Chr5q_12 Forward Primer
agttcaattcagcaaactcaaaa

SEQ ID NO: 6218 - DNA, 20 bp, Artificial Sequence
  Chr5q_12 Forward Primer
tgtttgctttgcattcgtct

SEQ ID NO: 6219 - DNA, 20 bp, Artificial Sequence
  Chr5q_12 Forward Primer
ttcaagagcaaggccagttt

SEQ ID NO: 6220 - DNA, 20 bp, Artificial Sequence
  Chr5q_12 Forward Primer
ttatttcaagagggcaaggc

SEQ ID NO: 6221 - DNA, 19 bp, Artificial Sequence
  Chr5q_12 Forward Primer
gccattaatatgcccccag

SEQ ID NO: 6222 - DNA, 20 bp, Artificial Sequence
  Chr5q_12 Forward Primer
gaaaactacacgcagcccag

SEQ ID NO: 6223 - DNA, 20 bp, Artificial Sequence
  Chr5q_12 Forward Primer
tacagagactgaggccaccc

SEQ ID NO: 6224 - DNA, 22 bp, Artificial Sequence
  Chr5q_12 Forward Primer
caggattcagcttaccagtttc

SEQ ID NO: 6225 - DNA, 21 bp, Artificial Sequence
  Chr5q_12 Forward Primer
tgagtaggtcctctgggaagc

SEQ ID NO: 6226 - DNA, 20 bp, Artificial Sequence
  Chr5q_12 Forward Primer
ttgttcgtgtcaaaccttgg

SEQ ID NO: 6227 - DNA, 24 bp, Artificial Sequence
  Chr5q_12 Forward Primer
tgcttggatatttcatgtgattct

SEQ ID NO: 6228 - DNA, 20 bp, Artificial Sequence
  Chr5q_12 Forward Primer
caacagtgtttttcccgctt

SEQ ID NO: 6229 - DNA, 20 bp, Artificial Sequence
  Chr5q_12 Forward Primer
tcaatcactcacccattcca

SEQ ID NO: 6230 - DNA, 20 bp, Artificial Sequence
  Chr5q_12 Forward Primer
cctcatggagcttcttgtcc

SEQ ID NO: 6231 - DNA, 20 bp, Artificial Sequence
  Chr5q_12 Forward Primer
ccccttccccataccttcta

SEQ ID NO: 6232 - DNA, 20 bp, Artificial Sequence
  Chr5q_12 Forward Primer
aaggcagccctggttagaat

SEQ ID NO: 6233 - DNA, 20 bp, Artificial Sequence
  Chr5q_12 Forward Primer
aaaacagtgacagccccaag

SEQ ID NO: 6234 - DNA, 21 bp, Artificial Sequence
  Chr5q_12 Forward Primer
tcctgcttaagcctacgtttg

SEQ ID NO: 6235 - DNA, 20 bp, Artificial Sequence
  Chr5q_12 Forward Primer
tgttgattcggcatttgttt

SEQ ID NO: 6236 - DNA, 21 bp, Artificial Sequence
  Chr5q_12 Forward Primer
agggatttccaactctccttg

SEQ ID NO: 6237 - DNA, 20 bp, Artificial Sequence
  Chr5q_12 Forward Primer
cccccaccacatctctaaaa

SEQ ID NO: 6238 - DNA, 20 bp, Artificial Sequence
  Chr5q_12 Forward Primer
ggaggaggatggctcttttt

SEQ ID NO: 6239 - DNA, 20 bp, Artificial Sequence
  Chr5q_12 Forward Primer
atggcccctaaaaacagtga

SEQ ID NO: 6240 - DNA, 20 bp, Artificial Sequence
  Chr5q_12 Forward Primer
ggcagcaaagtggtgatttt

SEQ ID NO: 6241 - DNA, 20 bp, Artificial Sequence
  Chr5q_12 Forward Primer
ctggaccctagcctcacttg

SEQ ID NO: 6242 - DNA, 20 bp, Artificial Sequence
  Chr5q_12 Forward Primer
gtcactggcctttggcatac

SEQ ID NO: 6243 - DNA, 20 bp, Artificial Sequence
  Chr5q_12 Forward Primer
taatgcacaaccaggagtgg

SEQ ID NO: 6244 - DNA, 23 bp, Artificial Sequence
  Chr5q_12 Forward Primer
tttgtcaatggtgaaagagtgaa

SEQ ID NO: 6245 - DNA, 20 bp, Artificial Sequence
  Chr5q_12 Forward Primer
ttgcaggattcaaccttgtg

SEQ ID NO: 6246 - DNA, 20 bp, Artificial Sequence
  Chr5q_12 Forward Primer
gacacttccaaaggttgcct

SEQ ID NO: 6247 - DNA, 26 bp, Artificial Sequence
  Chr5q_12 Forward Primer
gctgtagttggactaaaattcagtgt

SEQ ID NO: 6248 - DNA, 22 bp, Artificial Sequence
  Chr5q_12 Forward Primer
tggttacctctaccccaatgtt

SEQ ID NO: 6249 - DNA, 20 bp, Artificial Sequence
  Chr5q_12 Forward Primer
tcaccttgagaccagaaccc

SEQ ID NO: 6250 - DNA, 20 bp, Artificial Sequence
  Chr5q_12 Forward Primer
gcgatgtgaatccctagctt

SEQ ID NO: 6251 - DNA, 20 bp, Artificial Sequence
  Chr5q_12 Forward Primer
tcccctacgaagggatcttt

SEQ ID NO: 6252 - DNA, 20 bp, Artificial Sequence
  Chr5q_12 Forward Primer
cattttgcacggaggaaatc

SEQ ID NO: 6253 - DNA, 20 bp, Artificial Sequence
  Chr5q_12 Forward Primer
gctggttctgggaatgaaaa

SEQ ID NO: 6254 - DNA, 20 bp, Artificial Sequence
  Chr5q_12 Forward Primer
taactagcacagcttgcccc

SEQ ID NO: 6255 - DNA, 20 bp, Artificial Sequence
  Chr5q_12 Forward Primer
gtgacagcaaaagggggata

SEQ ID NO: 6256 - DNA, 21 bp, Artificial Sequence
  Chr5q_12 Forward Primer
tggcagagttactgaagggtc

SEQ ID NO: 6257 - DNA, 20 bp, Artificial Sequence
  Chr5q_12 Reverse Primer
cctgtcctcaacccatgtct

SEQ ID NO: 6258 - DNA, 20 bp, Artificial Sequence
  Chr5q_12 Reverse Primer
ggcaaggcagaaagcagata

SEQ ID NO: 6259 - DNA, 20 bp, Artificial Sequence
  Chr5q_12 Reverse Primer
tgcagaggtacagaatgcag

SEQ ID NO: 6260 - DNA, 19 bp, Artificial Sequence
  Chr5q_12 Reverse Primer
ccatccattggcttccttt

SEQ ID NO: 6261 - DNA, 20 bp, Artificial Sequence
  Chr5q_12 Reverse Primer
tgccagtttgtggtcttcag

SEQ ID NO: 6262 - DNA, 20 bp, Artificial Sequence
  Chr5q_12 Reverse Primer
tttggtgttcctcttcccac

SEQ ID NO: 6263 - DNA, 21 bp, Artificial Sequence
  Chr5q_12 Reverse Primer
ctgttcaccttcagccaactt

SEQ ID NO: 6264 - DNA, 20 bp, Artificial Sequence
  Chr5q_12 Reverse Primer
ctgccagggaactcaaagtc

SEQ ID NO: 6265 - DNA, 20 bp, Artificial Sequence
  Chr5q_12 Reverse Primer
gcacttcccagaatttccct

SEQ ID NO: 6266 - DNA, 20 bp, Artificial Sequence
  Chr5q_12 Reverse Primer
ttggccatctgaaagatttg

SEQ ID NO: 6267 - DNA, 20 bp, Artificial Sequence
  Chr5q_12 Reverse Primer
gcctcagtttcatatcggca

SEQ ID NO: 6268 - DNA, 20 bp, Artificial Sequence
  Chr5q_12 Reverse Primer
ggctttggagagaatgtgct

SEQ ID NO: 6269 - DNA, 20 bp, Artificial Sequence
  Chr5q_12 Reverse Primer
ggtcagaggatttcatggga

SEQ ID NO: 6270 - DNA, 20 bp, Artificial Sequence
  Chr5q_12 Reverse Primer
gccctggaatctgcctattt

SEQ ID NO: 6271 - DNA, 20 bp, Artificial Sequence
  Chr5q_12 Reverse Primer
cgtgtgacccacaagagaga

SEQ ID NO: 6272 - DNA, 20 bp, Artificial Sequence
  Chr5q_12 Reverse Primer
tcatttcctaaggctgtcgg

SEQ ID NO: 6273 - DNA, 20 bp, Artificial Sequence
  Chr5q_12 Reverse Primer
ctgagaattgccctcaggaa

SEQ ID NO: 6274 - DNA, 20 bp, Artificial Sequence
  Chr5q_12 Reverse Primer
tggcaagatgtcaggtgcta

SEQ ID NO: 6275 - DNA, 22 bp, Artificial Sequence
  Chr5q_12 Reverse Primer
ctgtgactaaatccccatgtga

SEQ ID NO: 6276 - DNA, 23 bp, Artificial Sequence
  Chr5q_12 Reverse Primer
aaagagggagcaaaagtaaagga

SEQ ID NO: 6277 - DNA, 20 bp, Artificial Sequence
  Chr5q_12 Reverse Primer
acatggtccccatgaacatt

SEQ ID NO: 6278 - DNA, 22 bp, Artificial Sequence
  Chr5q_12 Reverse Primer
tgccaatttgatagatcagcag

SEQ ID NO: 6279 - DNA, 24 bp, Artificial Sequence
  Chr5q_12 Reverse Primer
ttcccattcagtaccagaatactt

SEQ ID NO: 6280 - DNA, 20 bp, Artificial Sequence
  Chr5q_12 Reverse Primer
tgtctccatgattgcaaagc

SEQ ID NO: 6281 - DNA, 25 bp, Artificial Sequence
  Chr5q_12 Reverse Primer
ccagaagtcctaagagtaaattgga

SEQ ID NO: 6282 - DNA, 20 bp, Artificial Sequence
  Chr5q_12 Reverse Primer
tggcatctaaatctgcacaa

SEQ ID NO: 6283 - DNA, 20 bp, Artificial Sequence
  Chr5q_12 Reverse Primer
ggaacataaaggcaggtgga

SEQ ID NO: 6284 - DNA, 20 bp, Artificial Sequence
  Chr5q_12 Reverse Primer
gccccagagagagacacaag

SEQ ID NO: 6285 - DNA, 20 bp, Artificial Sequence
  Chr5q_12 Reverse Primer
tggggagaagaaaaaggaca

SEQ ID NO: 6286 - DNA, 20 bp, Artificial Sequence
  Chr5q_12 Reverse Primer
cagtcccacacatttcagca

SEQ ID NO: 6287 - DNA, 21 bp, Artificial Sequence
  Chr5q_12 Reverse Primer
aaagcaggccaataacttcaa

SEQ ID NO: 6288 - DNA, 22 bp, Artificial Sequence
  Chr5q_12 Reverse Primer
ttcctcgatgaatgatttagcc

SEQ ID NO: 6289 - DNA, 20 bp, Artificial Sequence
  Chr5q_12 Reverse Primer
tctccactgggaagcctaga

SEQ ID NO: 6290 - DNA, 20 bp, Artificial Sequence
  Chr5q_12 Reverse Primer
gtcagaattcgggcagacaa

SEQ ID NO: 6291 - DNA, 27 bp, Artificial Sequence
  Chr5q_12 Reverse Primer
aaacaaaagattaacacacttgatttt

SEQ ID NO: 6292 - DNA, 21 bp, Artificial Sequence
  Chr5q_12 Reverse Primer
tgggatccaattttcacatct

SEQ ID NO: 6293 - DNA, 20 bp, Artificial Sequence
  Chr5q_12 Reverse Primer
tcaattcaccatcctcctgc

SEQ ID NO: 6294 - DNA, 20 bp, Artificial Sequence
  Chr5q_12 Reverse Primer
gaacaactcacggccatctt

SEQ ID NO: 6295 - DNA, 20 bp, Artificial Sequence
  Chr5q_12 Reverse Primer
ttatgtcctgcagacaccca

SEQ ID NO: 6296 - DNA, 20 bp, Artificial Sequence
  Chr5q_12 Reverse Primer
aaatgcagaattcaccctcc

SEQ ID NO: 6297 - DNA, 20 bp, Artificial Sequence
  Chr5q_12 Reverse Primer
tccttactcccaggctcaga

SEQ ID NO: 6298 - DNA, 20 bp, Artificial Sequence
  Chr5q_12 Reverse Primer
atgaggcagagactggatgg

SEQ ID NO: 6299 - DNA, 21 bp, Artificial Sequence
  Chr5q_12 Reverse Primer
gaaaactcatgtcagtggcct

SEQ ID NO: 6300 - DNA, 20 bp, Artificial Sequence
  Chr5q_12 Reverse Primer
catctccacatctgacacgg

SEQ ID NO: 6301 - DNA, 20 bp, Artificial Sequence
  Chr5q_12 Reverse Primer
tgctggagcttcacaaagaa

SEQ ID NO: 6302 - DNA, 20 bp, Artificial Sequence
  Chr5q_12 Reverse Primer
agaaatgccacctgagaacc

SEQ ID NO: 6303 - DNA, 21 bp, Artificial Sequence
  Chr5q_12 Reverse Primer
tgaaacgtattatggcaagca

SEQ ID NO: 6304 - DNA, 20 bp, Artificial Sequence
  Chr5q_12 Reverse Primer
tggctggcctttataccatc

SEQ ID NO: 6305 - DNA, 20 bp, Artificial Sequence
  Chr5q_12 Reverse Primer
tttgtgtgggctggaaagat

SEQ ID NO: 6306 - DNA, 20 bp, Artificial Sequence
  Chr5q_12 Reverse Primer
ggcaggggaaatagaattgg

SEQ ID NO: 6307 - DNA, 21 bp, Artificial Sequence
  Chr5q_12 Reverse Primer
tcttggtgactaaagcctcaa

SEQ ID NO: 6308 - DNA, 21 bp, Artificial Sequence
  Chr5q_12 Reverse Primer
ttccatcctttggtcaaattc

SEQ ID NO: 6309 - DNA, 21 bp, Artificial Sequence
  Chr5q_12 Reverse Primer
ctggaagaaaacaagcaaagg

SEQ ID NO: 6310 - DNA, 20 bp, Artificial Sequence
  Chr5q_12 Reverse Primer
tggattgaaaaagtgcacca

SEQ ID NO: 6311 - DNA, 22 bp, Artificial Sequence
  Chr5q_12 Reverse Primer
tgatgtttccagttgaagctct

SEQ ID NO: 6312 - DNA, 20 bp, Artificial Sequence
  Chr5q_12 Reverse Primer
ttcttgaactatggcctggg

SEQ ID NO: 6313 - DNA, 20 bp, Artificial Sequence
  Chr5q_12 Reverse Primer
ctgggaatcctatggcaaaa

SEQ ID NO: 6314 - DNA, 20 bp, Artificial Sequence
  Chr5q_12 Reverse Primer
aggctgctttttcctacggt

SEQ ID NO: 6315 - DNA, 21 bp, Artificial Sequence
  Chr5q_12 Reverse Primer
tttttgcccctacttggtaca

SEQ ID NO: 6316 - DNA, 20 bp, Artificial Sequence
  Chr5q_12 Reverse Primer
gggaccagaacttagccaca

SEQ ID NO: 6317 - DNA, 22 bp, Artificial Sequence
  Chr5q_12 Reverse Primer
ttcagttcaaagtgtctgcctt

SEQ ID NO: 6318 - DNA, 20 bp, Artificial Sequence
  Chr5q_12 Reverse Primer
ttatggggatgcctctcatt

SEQ ID NO: 6319 - DNA, 20 bp, Artificial Sequence
  Chr5q_12 Reverse Primer
acattgtggagcaagtctgc

SEQ ID NO: 6320 - DNA, 20 bp, Artificial Sequence
  Chr5q_12 Reverse Primer
tgagggggtgattacgtttt

SEQ ID NO: 6321 - DNA, 22 bp, Artificial Sequence
  Chr5q_12 Reverse Primer
ttgtttgatttggtcattgttg

SEQ ID NO: 6322 - DNA, 23 bp, Artificial Sequence
  Chr5q_12 Reverse Primer
caccacattagtttgctgtttca

SEQ ID NO: 6323 - DNA, 23 bp, Artificial Sequence
  Chr5q_12 Reverse Primer
tgaagatttagctttaaggtgcc

SEQ ID NO: 6324 - DNA, 23 bp, Artificial Sequence
  Chr5q_12 Reverse Primer
gggcttaggcctttaaaataaca

SEQ ID NO: 6325 - DNA, 20 bp, Artificial Sequence
  Chr5q_12 Reverse Primer
ggtgccagatggaaagaaaa

SEQ ID NO: 6326 - DNA, 20 bp, Artificial Sequence
  Chr5q_12 Reverse Primer
gcacagagccaggctaattt

SEQ ID NO: 6327 - DNA, 20 bp, Artificial Sequence
  Chr5q_12 Reverse Primer
tgggttttcctgtgtttgtg

SEQ ID NO: 6328 - DNA, 20 bp, Artificial Sequence
  Chr5q_12 Reverse Primer
tagagcgctgctttgtttca

SEQ ID NO: 6329 - DNA, 20 bp, Artificial Sequence
  Chr5q_12 Reverse Primer
tggcaattgacagaacaagg

SEQ ID NO: 6330 - DNA, 20 bp, Artificial Sequence
  Chr5q_12 Reverse Primer
agtaggcaaagagggggatg

SEQ ID NO: 6331 - DNA, 20 bp, Artificial Sequence
  Chr5q_12 Reverse Primer
gccttatgcatttttctgcc

SEQ ID NO: 6332 - DNA, 20 bp, Artificial Sequence
  Chr5q_12 Reverse Primer
ccattcagaaccaaacacca

SEQ ID NO: 6333 - DNA, 20 bp, Artificial Sequence
  Chr5q_12 Reverse Primer
gaaagaagccagccttcaga

SEQ ID NO: 6334 - DNA, 20 bp, Artificial Sequence
  Chr5q_12 Reverse Primer
actatgcccaggatcaccag

SEQ ID NO: 6335 - DNA, 20 bp, Artificial Sequence
  Chr5q_12 Reverse Primer
aagacagcttcctcccctgt

SEQ ID NO: 6336 - DNA, 20 bp, Artificial Sequence
  Chr5q_12 Reverse Primer
agattcctttcatgccgttg

SEQ ID NO: 6337 - DNA, 20 bp, Artificial Sequence
  Chr5q_12 Reverse Primer
tccttacttcccgctcagaa

SEQ ID NO: 6338 - DNA, 20 bp, Artificial Sequence
  Chr5q_12 Reverse Primer
tattgggaggaggggtgaat

SEQ ID NO: 6339 - DNA, 23 bp, Artificial Sequence
  Chr5q_12 Reverse Primer
atttgttggtgttacttttccaa

SEQ ID NO: 6340 - DNA, 20 bp, Artificial Sequence
  Chr5q_12 Reverse Primer
tgttgattgtaagatgggcg

SEQ ID NO: 6341 - DNA, 20 bp, Artificial Sequence
  Chr5q_12 Reverse Primer
gcttacggaagctgcgttac

SEQ ID NO: 6342 - DNA, 20 bp, Artificial Sequence
  Chr5q_12 Reverse Primer
ggtaaaagagcacagcgagg

SEQ ID NO: 6343 - DNA, 21 bp, Artificial Sequence
  Chr5q_12 Reverse Primer
tgagacagatccagagaacca

SEQ ID NO: 6344 - DNA, 20 bp, Artificial Sequence
  Chr5q_12 Reverse Primer
gaagcatcaggaaagaacgg

SEQ ID NO: 6345 - DNA, 20 bp, Artificial Sequence
  Chr5q_12 Reverse Primer
agctgagtctccccaaaaca

SEQ ID NO: 6346 - DNA, 20 bp, Artificial Sequence
  Chr5q_12 Reverse Primer
gcataaatgctgactgagcg

SEQ ID NO: 6347 - DNA, 20 bp, Artificial Sequence
  Chr5q_12 Reverse Primer
tcatggctgtgagaagtcca

SEQ ID NO: 6348 - DNA, 20 bp, Artificial Sequence
  Chr5q_12 Reverse Primer
tcaagaagctgagcccaaat

SEQ ID NO: 6349 - DNA, 21 bp, Artificial Sequence
  Chr5q_12 Reverse Primer
cctgggctggaactctgtact

SEQ ID NO: 6350 - DNA, 24 bp, Artificial Sequence
  Chr5q_12 Reverse Primer
tcagaaatagatgtgatgattgcc

SEQ ID NO: 6351 - DNA, 22 bp, Artificial Sequence
  Chr5q_12 Reverse Primer
gaaaaggctagtggaagaagga

SEQ ID NO: 6352 - DNA, 20 bp, Artificial Sequence
  Chr5q_12 Reverse Primer
tcttgcacttgctatgccac

SEQ ID NO: 6353 - DNA, 20 bp, Artificial Sequence
  Chr5q_13 Forward Primer
acagaagtcaggccaaaagg

SEQ ID NO: 6354 - DNA, 20 bp, Artificial Sequence
  Chr5q_13 Forward Primer
acacgtgcctgagctaggag

SEQ ID NO: 6355 - DNA, 20 bp, Artificial Sequence
  Chr5q_13 Forward Primer
ttggactcacctttggttcc

SEQ ID NO: 6356 - DNA, 20 bp, Artificial Sequence
  Chr5q_13 Forward Primer
cagggaagggctgtgttcta

SEQ ID NO: 6357 - DNA, 20 bp, Artificial Sequence
  Chr5q_13 Forward Primer
tcagtttggatggagcacag

SEQ ID NO: 6358 - DNA, 20 bp, Artificial Sequence
  Chr5q_13 Forward Primer
aatctgacagctcaggctcc

SEQ ID NO: 6359 - DNA, 20 bp, Artificial Sequence
  Chr5q_13 Forward Primer
tggacctgtcctctcctgac

SEQ ID NO: 6360 - DNA, 21 bp, Artificial Sequence
  Chr5q_13 Forward Primer
aaactccattcaccacacctg

SEQ ID NO: 6361 - DNA, 20 bp, Artificial Sequence
  Chr5q_13 Forward Primer
aggatgtgctggttcctgtc

SEQ ID NO: 6362 - DNA, 20 bp, Artificial Sequence
  Chr5q_13 Forward Primer
ggcacctccaacaaaagaaa

SEQ ID NO: 6363 - DNA, 20 bp, Artificial Sequence
  Chr5q_13 Forward Primer
accctcacaacagccctatg

SEQ ID NO: 6364 - DNA, 20 bp, Artificial Sequence
  Chr5q_13 Forward Primer
atgaatttgggaaggaaggg

SEQ ID NO: 6365 - DNA, 20 bp, Artificial Sequence
  Chr5q_13 Forward Primer
ggactctttccactgcctca

SEQ ID NO: 6366 - DNA, 20 bp, Artificial Sequence
  Chr5q_13 Forward Primer
gacccagagtctgtctccca

SEQ ID NO: 6367 - DNA, 20 bp, Artificial Sequence
  Chr5q_13 Forward Primer
agcctcacttatgctgggtg

SEQ ID NO: 6368 - DNA, 20 bp, Artificial Sequence
  Chr5q_13 Forward Primer
caggccttgttagcttagcg

SEQ ID NO: 6369 - DNA, 20 bp, Artificial Sequence
  Chr5q_13 Forward Primer
ggatggatgtctgagtgggt

SEQ ID NO: 6370 - DNA, 20 bp, Artificial Sequence
  Chr5q_13 Forward Primer
ggatggatgatcaggtttgg

SEQ ID NO: 6371 - DNA, 20 bp, Artificial Sequence
  Chr5q_13 Forward Primer
agacaccatcatagggctgg

SEQ ID NO: 6372 - DNA, 20 bp, Artificial Sequence
  Chr5q_13 Forward Primer
gtgggtttctgttgtttgcc

SEQ ID NO: 6373 - DNA, 20 bp, Artificial Sequence
  Chr5q_13 Forward Primer
gcctggaacaccgtactttc

SEQ ID NO: 6374 - DNA, 20 bp, Artificial Sequence
  Chr5q_13 Forward Primer
cctcgtggatcacttgctct

SEQ ID NO: 6375 - DNA, 20 bp, Artificial Sequence
  Chr5q_13 Forward Primer
ggggagggattgtgtatcct

SEQ ID NO: 6376 - DNA, 20 bp, Artificial Sequence
  Chr5q_13 Forward Primer
ctgttgtccggagtctgctt

SEQ ID NO: 6377 - DNA, 20 bp, Artificial Sequence
  Chr5q_13 Forward Primer
ggggcatttgttgtgttttt

SEQ ID NO: 6378 - DNA, 20 bp, Artificial Sequence
  Chr5q_13 Forward Primer
agtcactggactttccaggc

SEQ ID NO: 6379 - DNA, 19 bp, Artificial Sequence
  Chr5q_13 Forward Primer
tcatctccccatctggtca

SEQ ID NO: 6380 - DNA, 20 bp, Artificial Sequence
  Chr5q_13 Forward Primer
aacctggagaaagggagagc

SEQ ID NO: 6381 - DNA, 20 bp, Artificial Sequence
  Chr5q_13 Forward Primer
ttccataaacacaagccggt

SEQ ID NO: 6382 - DNA, 20 bp, Artificial Sequence
  Chr5q_13 Forward Primer
ttgtggtcattgccaacagt

SEQ ID NO: 6383 - DNA, 20 bp, Artificial Sequence
  Chr5q_13 Forward Primer
ttgcttctcccctgcttaac

SEQ ID NO: 6384 - DNA, 20 bp, Artificial Sequence
  Chr5q_13 Forward Primer
ttgctatggaaaatggaccc

SEQ ID NO: 6385 - DNA, 20 bp, Artificial Sequence
  Chr5q_13 Forward Primer
atgtgaatccaactcccctg

SEQ ID NO: 6386 - DNA, 20 bp, Artificial Sequence
  Chr5q_13 Forward Primer
cagataggcatctgggcagt

SEQ ID NO: 6387 - DNA, 20 bp, Artificial Sequence
  Chr5q_13 Forward Primer
ccacagtcaatccatcatgc

SEQ ID NO: 6388 - DNA, 20 bp, Artificial Sequence
  Chr5q_13 Forward Primer
ccttaccagcctcctcttcc

SEQ ID NO: 6389 - DNA, 20 bp, Artificial Sequence
  Chr5q_13 Forward Primer
gcaagccctacagctgaatc

SEQ ID NO: 6390 - DNA, 20 bp, Artificial Sequence
  Chr5q_13 Forward Primer
ccaaccctgcctacgtctaa

SEQ ID NO: 6391 - DNA, 20 bp, Artificial Sequence
  Chr5q_13 Forward Primer
cagagagagggagggaggag

SEQ ID NO: 6392 - DNA, 20 bp, Artificial Sequence
  Chr5q_13 Forward Primer
tgatttcctcattgtgcctg

SEQ ID NO: 6393 - DNA, 20 bp, Artificial Sequence
  Chr5q_13 Forward Primer
aaagcagttctcagccatcc

SEQ ID NO: 6394 - DNA, 20 bp, Artificial Sequence
  Chr5q_13 Forward Primer
gcgtctccctcatttccata

SEQ ID NO: 6395 - DNA, 20 bp, Artificial Sequence
  Chr5q_13 Forward Primer
ctccatccaggactagctgc

SEQ ID NO: 6396 - DNA, 20 bp, Artificial Sequence
  Chr5q_13 Forward Primer
gggtgatttactcaggggct

SEQ ID NO: 6397 - DNA, 20 bp, Artificial Sequence
  Chr5q_13 Forward Primer
tcccctgggagaacttcttt

SEQ ID NO: 6398 - DNA, 26 bp, Artificial Sequence
  Chr5q_13 Forward Primer
ggaaaattaaaacttatgtatgtggc

SEQ ID NO: 6399 - DNA, 20 bp, Artificial Sequence
  Chr5q_13 Forward Primer
tggtggaaaagagcttgagg

SEQ ID NO: 6400 - DNA, 20 bp, Artificial Sequence
  Chr5q_13 Forward Primer
cttcttatgagcccactggc

SEQ ID NO: 6401 - DNA, 20 bp, Artificial Sequence
  Chr5q_13 Forward Primer
agatgagaccttgggccttt

SEQ ID NO: 6402 - DNA, 20 bp, Artificial Sequence
  Chr5q_13 Forward Primer
acacctgcaattctctgcct

SEQ ID NO: 6403 - DNA, 20 bp, Artificial Sequence
  Chr5q_13 Forward Primer
cacagtagcaactggcctga

SEQ ID NO: 6404 - DNA, 20 bp, Artificial Sequence
  Chr5q_13 Forward Primer
aggcaagagcatacctgctg

SEQ ID NO: 6405 - DNA, 20 bp, Artificial Sequence
  Chr5q_13 Forward Primer
agccacccttgaatttgaga

SEQ ID NO: 6406 - DNA, 20 bp, Artificial Sequence
  Chr5q_13 Forward Primer
ctgccttgggcttaaacaaa

SEQ ID NO: 6407 - DNA, 20 bp, Artificial Sequence
  Chr5q_13 Forward Primer
agagtgcatgagcagcaaga

SEQ ID NO: 6408 - DNA, 20 bp, Artificial Sequence
  Chr5q_13 Forward Primer
tgcaaccttggtgagtgaaa

SEQ ID NO: 6409 - DNA, 20 bp, Artificial Sequence
  Chr5q_13 Forward Primer
tggtggagagagacctccat

SEQ ID NO: 6410 - DNA, 20 bp, Artificial Sequence
  Chr5q_13 Forward Primer
atggaataggagctggagca

SEQ ID NO: 6411 - DNA, 20 bp, Artificial Sequence
  Chr5q_13 Forward Primer
aacagatgaaatcctccccc

SEQ ID NO: 6412 - DNA, 20 bp, Artificial Sequence
  Chr5q_13 Forward Primer
taaggcgaccgttcttcact

SEQ ID NO: 6413 - DNA, 20 bp, Artificial Sequence
  Chr5q_13 Forward Primer
tctgaacctccatttcctgg

SEQ ID NO: 6414 - DNA, 20 bp, Artificial Sequence
  Chr5q_13 Forward Primer
gtctccaagtaacagggcca

SEQ ID NO: 6415 - DNA, 20 bp, Artificial Sequence
  Chr5q_13 Forward Primer
cagatgtgggctgattctca

SEQ ID NO: 6416 - DNA, 20 bp, Artificial Sequence
  Chr5q_13 Forward Primer
cgcttgcaacacaaagaaaa

SEQ ID NO: 6417 - DNA, 20 bp, Artificial Sequence
  Chr5q_13 Forward Primer
gctgacatccaaaccctgat

SEQ ID NO: 6418 - DNA, 25 bp, Artificial Sequence
  Chr5q_13 Forward Primer
aattgagatagtcaaataaacaggc

SEQ ID NO: 6419 - DNA, 20 bp, Artificial Sequence
  Chr5q_13 Forward Primer
cccagagaagtgtctggagc

SEQ ID NO: 6420 - DNA, 20 bp, Artificial Sequence
  Chr5q_13 Forward Primer
aaaaattcctgccggaaaag

SEQ ID NO: 6421 - DNA, 20 bp, Artificial Sequence
  Chr5q_13 Forward Primer
ttatgtggggagaggaccag

SEQ ID NO: 6422 - DNA, 20 bp, Artificial Sequence
  Chr5q_13 Forward Primer
aatgcaccccatgtgtttct

SEQ ID NO: 6423 - DNA, 20 bp, Artificial Sequence
  Chr5q_13 Forward Primer
gcccttgaagttgcctacag

SEQ ID NO: 6424 - DNA, 20 bp, Artificial Sequence
  Chr5q_13 Forward Primer
tgttttggacaaaccaccaa

SEQ ID NO: 6425 - DNA, 20 bp, Artificial Sequence
  Chr5q_13 Forward Primer
ctcatcgccatgggtaatct

SEQ ID NO: 6426 - DNA, 20 bp, Artificial Sequence
  Chr5q_13 Forward Primer
gctggagatgcagactttcc

SEQ ID NO: 6427 - DNA, 23 bp, Artificial Sequence
  Chr5q_13 Forward Primer
tgtctgcaactgacaaaacaaga

SEQ ID NO: 6428 - DNA, 20 bp, Artificial Sequence
  Chr5q_13 Forward Primer
aaactaccccatcctcctgg

SEQ ID NO: 6429 - DNA, 21 bp, Artificial Sequence
  Chr5q_13 Forward Primer
gaaatggtggggaataaacaa

SEQ ID NO: 6430 - DNA, 20 bp, Artificial Sequence
  Chr5q_13 Forward Primer
gtggttgatgcttgttggtg

SEQ ID NO: 6431 - DNA, 20 bp, Artificial Sequence
  Chr5q_13 Forward Primer
atcttgaacctgccttggtg

SEQ ID NO: 6432 - DNA, 20 bp, Artificial Sequence
  Chr5q_13 Forward Primer
tcgacctcctctaggcttca

SEQ ID NO: 6433 - DNA, 20 bp, Artificial Sequence
  Chr5q_13 Forward Primer
gatttccagttcagacccca

SEQ ID NO: 6434 - DNA, 20 bp, Artificial Sequence
  Chr5q_13 Forward Primer
ctcaggaggatacaaccgga

SEQ ID NO: 6435 - DNA, 20 bp, Artificial Sequence
  Chr5q_13 Forward Primer
aagagatgaagccccagaca

SEQ ID NO: 6436 - DNA, 20 bp, Artificial Sequence
  Chr5q_13 Forward Primer
ggaatggcacgatcagattt

SEQ ID NO: 6437 - DNA, 20 bp, Artificial Sequence
  Chr5q_13 Forward Primer
cccctattgatgggtggtta

SEQ ID NO: 6438 - DNA, 20 bp, Artificial Sequence
  Chr5q_13 Forward Primer
tgaagaggaattgacagggc

SEQ ID NO: 6439 - DNA, 20 bp, Artificial Sequence
  Chr5q_13 Forward Primer
cctgctatccagtctcctgc

SEQ ID NO: 6440 - DNA, 20 bp, Artificial Sequence
  Chr5q_13 Forward Primer
cagacaaaaatagcccccag

SEQ ID NO: 6441 - DNA, 20 bp, Artificial Sequence
  Chr5q_13 Forward Primer
tgggtgggatcagaaaatgt

SEQ ID NO: 6442 - DNA, 20 bp, Artificial Sequence
  Chr5q_13 Forward Primer
gccagttcacttcctcttgc

SEQ ID NO: 6443 - DNA, 20 bp, Artificial Sequence
  Chr5q_13 Forward Primer
tgagacttctttcatgggca

SEQ ID NO: 6444 - DNA, 20 bp, Artificial Sequence
  Chr5q_13 Forward Primer
tttggtttcccctgaagttg

SEQ ID NO: 6445 - DNA, 20 bp, Artificial Sequence
  Chr5q_13 Forward Primer
cataattgccatccctgtcc

SEQ ID NO: 6446 - DNA, 20 bp, Artificial Sequence
  Chr5q_13 Forward Primer
tcattgctttgtaccccaca

SEQ ID NO: 6447 - DNA, 20 bp, Artificial Sequence
  Chr5q_13 Forward Primer
agggagaaatgatgcattgg

SEQ ID NO: 6448 - DNA, 20 bp, Artificial Sequence
  Chr5q_13 Forward Primer
tcactggttctgtggtgagc

SEQ ID NO: 6449 - DNA, 20 bp, Artificial Sequence
  Chr5q_13 Reverse Primer
acaccccctaaggctttgtt

SEQ ID NO: 6450 - DNA, 20 bp, Artificial Sequence
  Chr5q_13 Reverse Primer
agctgagcacttgctgtcaa

SEQ ID NO: 6451 - DNA, 20 bp, Artificial Sequence
  Chr5q_13 Reverse Primer
tttctctcttcccatgcacc

SEQ ID NO: 6452 - DNA, 20 bp, Artificial Sequence
  Chr5q_13 Reverse Primer
ctgggtctccaagacctgaa

SEQ ID NO: 6453 - DNA, 20 bp, Artificial Sequence
  Chr5q_13 Reverse Primer
gactggttcctctccccttc

SEQ ID NO: 6454 - DNA, 20 bp, Artificial Sequence
  Chr5q_13 Reverse Primer
tcctatttctccagagggca

SEQ ID NO: 6455 - DNA, 20 bp, Artificial Sequence
  Chr5q_13 Reverse Primer
gggaccctgtgaccttacaa

SEQ ID NO: 6456 - DNA, 20 bp, Artificial Sequence
  Chr5q_13 Reverse Primer
cttctacgtgggtagccctg

SEQ ID NO: 6457 - DNA, 20 bp, Artificial Sequence
  Chr5q_13 Reverse Primer
gttgctaacaaaagctgggg

SEQ ID NO: 6458 - DNA, 20 bp, Artificial Sequence
  Chr5q_13 Reverse Primer
aggagggaggagagcagaga

SEQ ID NO: 6459 - DNA, 20 bp, Artificial Sequence
  Chr5q_13 Reverse Primer
caggtctacaccctaggcca

SEQ ID NO: 6460 - DNA, 21 bp, Artificial Sequence
  Chr5q_13 Reverse Primer
tcgtgtgactttcacaaacca

SEQ ID NO: 6461 - DNA, 20 bp, Artificial Sequence
  Chr5q_13 Reverse Primer
tatcagccaccatcacatgc

SEQ ID NO: 6462 - DNA, 20 bp, Artificial Sequence
  Chr5q_13 Reverse Primer
tgggcacaaagacagaaaaa

SEQ ID NO: 6463 - DNA, 20 bp, Artificial Sequence
  Chr5q_13 Reverse Primer
ctctttccatcgagagccag

SEQ ID NO: 6464 - DNA, 20 bp, Artificial Sequence
  Chr5q_13 Reverse Primer
tgtaggagcttggccacttt

SEQ ID NO: 6465 - DNA, 26 bp, Artificial Sequence
  Chr5q_13 Reverse Primer
gcccatcctacttcctgtatacttac

SEQ ID NO: 6466 - DNA, 20 bp, Artificial Sequence
  Chr5q_13 Reverse Primer
ttcctgatgggattggtcat

SEQ ID NO: 6467 - DNA, 20 bp, Artificial Sequence
  Chr5q_13 Reverse Primer
gtgttcctgggcttctcttg

SEQ ID NO: 6468 - DNA, 20 bp, Artificial Sequence
  Chr5q_13 Reverse Primer
catgctaatgcaaatgcaca

SEQ ID NO: 6469 - DNA, 20 bp, Artificial Sequence
  Chr5q_13 Reverse Primer
atagatcctgccctcaagca

SEQ ID NO: 6470 - DNA, 20 bp, Artificial Sequence
  Chr5q_13 Reverse Primer
ggaacacaaacaggggctaa

SEQ ID NO: 6471 - DNA, 19 bp, Artificial Sequence
  Chr5q_13 Reverse Primer
ggaaggcctctgtaatccg

SEQ ID NO: 6472 - DNA, 18 bp, Artificial Sequence
  Chr5q_13 Reverse Primer
gtggctgtggcattgtga

SEQ ID NO: 6473 - DNA, 20 bp, Artificial Sequence
  Chr5q_13 Reverse Primer
agcctgtcaacgtctgcttt

SEQ ID NO: 6474 - DNA, 20 bp, Artificial Sequence
  Chr5q_13 Reverse Primer
cgtttcctgacaggttttcc

SEQ ID NO: 6475 - DNA, 20 bp, Artificial Sequence
  Chr5q_13 Reverse Primer
atagtggatgtggtggggga

SEQ ID NO: 6476 - DNA, 20 bp, Artificial Sequence
  Chr5q_13 Reverse Primer
gcttactgagggacagccag

SEQ ID NO: 6477 - DNA, 20 bp, Artificial Sequence
  Chr5q_13 Reverse Primer
gcttagcctcgtgtccaaag

SEQ ID NO: 6478 - DNA, 20 bp, Artificial Sequence
  Chr5q_13 Reverse Primer
gattttcctctgtcccgatg

SEQ ID NO: 6479 - DNA, 20 bp, Artificial Sequence
  Chr5q_13 Reverse Primer
acacagcaacaccactgctc

SEQ ID NO: 6480 - DNA, 20 bp, Artificial Sequence
  Chr5q_13 Reverse Primer
agaaaatgcaccccaaacag

SEQ ID NO: 6481 - DNA, 20 bp, Artificial Sequence
  Chr5q_13 Reverse Primer
ggcttctggactcagtttgc

SEQ ID NO: 6482 - DNA, 20 bp, Artificial Sequence
  Chr5q_13 Reverse Primer
agacacccgggaacaagagt

SEQ ID NO: 6483 - DNA, 20 bp, Artificial Sequence
  Chr5q_13 Reverse Primer
tttggatttcagaccaaggg

SEQ ID NO: 6484 - DNA, 20 bp, Artificial Sequence
  Chr5q_13 Reverse Primer
gctgctgggatgagaatgag

SEQ ID NO: 6485 - DNA, 20 bp, Artificial Sequence
  Chr5q_13 Reverse Primer
aaagggatccttggtggttt

SEQ ID NO: 6486 - DNA, 20 bp, Artificial Sequence
  Chr5q_13 Reverse Primer
gcaaaatggaggagcagaag

SEQ ID NO: 6487 - DNA, 22 bp, Artificial Sequence
  Chr5q_13 Reverse Primer
tctttaaaaacaagggtgaggc

SEQ ID NO: 6488 - DNA, 20 bp, Artificial Sequence
  Chr5q_13 Reverse Primer
gaattctgttccctccgtga

SEQ ID NO: 6489 - DNA, 20 bp, Artificial Sequence
  Chr5q_13 Reverse Primer
gttccactcgaggacgtgtt

SEQ ID NO: 6490 - DNA, 20 bp, Artificial Sequence
  Chr5q_13 Reverse Primer
cttcattttccttggggaca

SEQ ID NO: 6491 - DNA, 19 bp, Artificial Sequence
  Chr5q_13 Reverse Primer
aaggttggggtggcaatta

SEQ ID NO: 6492 - DNA, 20 bp, Artificial Sequence
  Chr5q_13 Reverse Primer
aactggttgctgaatctggg

SEQ ID NO: 6493 - DNA, 20 bp, Artificial Sequence
  Chr5q_13 Reverse Primer
cgtcttttgaactgcccaat

SEQ ID NO: 6494 - DNA, 21 bp, Artificial Sequence
  Chr5q_13 Reverse Primer
tggttgtgtactggctgttga

SEQ ID NO: 6495 - DNA, 20 bp, Artificial Sequence
  Chr5q_13 Reverse Primer
cacgtgagcctccttctagg

SEQ ID NO: 6496 - DNA, 20 bp, Artificial Sequence
  Chr5q_13 Reverse Primer
cagtttgcgcacctacaaaa

SEQ ID NO: 6497 - DNA, 20 bp, Artificial Sequence
  Chr5q_13 Reverse Primer
cgacagcatctgaaacagga

SEQ ID NO: 6498 - DNA, 20 bp, Artificial Sequence
  Chr5q_13 Reverse Primer
aaacctgggagatgatgtgg

SEQ ID NO: 6499 - DNA, 20 bp, Artificial Sequence
  Chr5q_13 Reverse Primer
ctggaattggagaagggtca

SEQ ID NO: 6500 - DNA, 21 bp, Artificial Sequence
  Chr5q_13 Reverse Primer
ttggacccatagttcaatgct

SEQ ID NO: 6501 - DNA, 20 bp, Artificial Sequence
  Chr5q_13 Reverse Primer
ttattgcatggacccacaaa

SEQ ID NO: 6502 - DNA, 20 bp, Artificial Sequence
  Chr5q_13 Reverse Primer
gaagcaagcattctgggaaa

SEQ ID NO: 6503 - DNA, 20 bp, Artificial Sequence
  Chr5q_13 Reverse Primer
ctctcgcttgggtctactgg

SEQ ID NO: 6504 - DNA, 20 bp, Artificial Sequence
  Chr5q_13 Reverse Primer
agcagcctacgatgaaagga

SEQ ID NO: 6505 - DNA, 20 bp, Artificial Sequence
  Chr5q_13 Reverse Primer
tggacccattttctgaacct

SEQ ID NO: 6506 - DNA, 24 bp, Artificial Sequence
  Chr5q_13 Reverse Primer
cccctcaaaattattatcaaggtc

SEQ ID NO: 6507 - DNA, 20 bp, Artificial Sequence
  Chr5q_13 Reverse Primer
gatctgatcccacacaggct

SEQ ID NO: 6508 - DNA, 20 bp, Artificial Sequence
  Chr5q_13 Reverse Primer
aggccaggaaagcttgaata

SEQ ID NO: 6509 - DNA, 20 bp, Artificial Sequence
  Chr5q_13 Reverse Primer
caatcagtggaaaaagggga

SEQ ID NO: 6510 - DNA, 20 bp, Artificial Sequence
  Chr5q_13 Reverse Primer
tgaatgcgacattttctcca

SEQ ID NO: 6511 - DNA, 20 bp, Artificial Sequence
  Chr5q_13 Reverse Primer
ggagaatgcttgttggtgct

SEQ ID NO: 6512 - DNA, 20 bp, Artificial Sequence
  Chr5q_13 Reverse Primer
gaagccgaggcacagaatag

SEQ ID NO: 6513 - DNA, 20 bp, Artificial Sequence
  Chr5q_13 Reverse Primer
ccaggagcagcagaagaaac

SEQ ID NO: 6514 - DNA, 21 bp, Artificial Sequence
  Chr5q_13 Reverse Primer
ggcttgtgacttatggcttca

SEQ ID NO: 6515 - DNA, 20 bp, Artificial Sequence
  Chr5q_13 Reverse Primer
gcggctcatgctattttgat

SEQ ID NO: 6516 - DNA, 20 bp, Artificial Sequence
  Chr5q_13 Reverse Primer
tctgagaccaatacctgggg

SEQ ID NO: 6517 - DNA, 20 bp, Artificial Sequence
  Chr5q_13 Reverse Primer
cactgcactttaagcaggca

SEQ ID NO: 6518 - DNA, 20 bp, Artificial Sequence
  Chr5q_13 Reverse Primer
gcccttttggaggacagaat

SEQ ID NO: 6519 - DNA, 20 bp, Artificial Sequence
  Chr5q_13 Reverse Primer
tcactgcctagaaccctcca

SEQ ID NO: 6520 - DNA, 20 bp, Artificial Sequence
  Chr5q_13 Reverse Primer
tgctcacagaagggagacct

SEQ ID NO: 6521 - DNA, 20 bp, Artificial Sequence
  Chr5q_13 Reverse Primer
ctggcctagacccagaacac

SEQ ID NO: 6522 - DNA, 20 bp, Artificial Sequence
  Chr5q_13 Reverse Primer
tgacctttgaccccagtttc

SEQ ID NO: 6523 - DNA, 20 bp, Artificial Sequence
  Chr5q_13 Reverse Primer
gcaggtagactgagccttgg

SEQ ID NO: 6524 - DNA, 20 bp, Artificial Sequence
  Chr5q_13 Reverse Primer
gtctggaaattctgcgggta

SEQ ID NO: 6525 - DNA, 22 bp, Artificial Sequence
  Chr5q_13 Reverse Primer
tttgctcttaggagagggacag

SEQ ID NO: 6526 - DNA, 20 bp, Artificial Sequence
  Chr5q_13 Reverse Primer
attgctccttttcaagccct

SEQ ID NO: 6527 - DNA, 20 bp, Artificial Sequence
  Chr5q_13 Reverse Primer
gcaaagtcctgctcatctcc

SEQ ID NO: 6528 - DNA, 20 bp, Artificial Sequence
  Chr5q_13 Reverse Primer
ggccaggaaggaaatgtaaa

SEQ ID NO: 6529 - DNA, 20 bp, Artificial Sequence
  Chr5q_13 Reverse Primer
aagtccaaaacaatggctgg

SEQ ID NO: 6530 - DNA, 20 bp, Artificial Sequence
  Chr5q_13 Reverse Primer
tgggtctccccagtatcttg

SEQ ID NO: 6531 - DNA, 20 bp, Artificial Sequence
  Chr5q_13 Reverse Primer
ctccatcgaaccctgttcac

SEQ ID NO: 6532 - DNA, 20 bp, Artificial Sequence
  Chr5q_13 Reverse Primer
aatcagcctccttcagggat

SEQ ID NO: 6533 - DNA, 20 bp, Artificial Sequence
  Chr5q_13 Reverse Primer
ggagggctaccatctgcttt

SEQ ID NO: 6534 - DNA, 20 bp, Artificial Sequence
  Chr5q_13 Reverse Primer
gtcagagtgctttcctccca

SEQ ID NO: 6535 - DNA, 20 bp, Artificial Sequence
  Chr5q_13 Reverse Primer
aacttgctgaccaaaggtgg

SEQ ID NO: 6536 - DNA, 20 bp, Artificial Sequence
  Chr5q_13 Reverse Primer
actccaggaggtctggactg

SEQ ID NO: 6537 - DNA, 20 bp, Artificial Sequence
  Chr5q_13 Reverse Primer
gttgccacgatgatttgatg

SEQ ID NO: 6538 - DNA, 20 bp, Artificial Sequence
  Chr5q_13 Reverse Primer
taggctcagacgagtttgcc

SEQ ID NO: 6539 - DNA, 20 bp, Artificial Sequence
  Chr5q_13 Reverse Primer
gaaccgatcttggcagtgac

SEQ ID NO: 6540 - DNA, 20 bp, Artificial Sequence
  Chr5q_13 Reverse Primer
gaccagtcctagggcagaca

SEQ ID NO: 6541 - DNA, 20 bp, Artificial Sequence
  Chr5q_13 Reverse Primer
agggctgggttagtgagagg

SEQ ID NO: 6542 - DNA, 20 bp, Artificial Sequence
  Chr5q_13 Reverse Primer
tcagcaggctggaggtttat

SEQ ID NO: 6543 - DNA, 20 bp, Artificial Sequence
  Chr5q_13 Reverse Primer
ggggcaagaggtctgacttt

SEQ ID NO: 6544 - DNA, 20 bp, Artificial Sequence
  Chr5q_13 Reverse Primer
atctgctgagccagcttttt

SEQ ID NO: 6545 - DNA, 18 bp, Artificial Sequence
  Chr7q_1 Forward Primer
gtgggagagtccgtgcct

SEQ ID NO: 6546 - DNA, 18 bp, Artificial Sequence
  Chr7q_1 Forward Primer
ctggcacgtacgagtggg

SEQ ID NO: 6547 - DNA, 20 bp, Artificial Sequence
  Chr7q_1 Forward Primer
attgcataggccaccgtaag

SEQ ID NO: 6548 - DNA, 20 bp, Artificial Sequence
  Chr7q_1 Forward Primer
ggtgtgtattccttggggtg

SEQ ID NO: 6549 - DNA, 19 bp, Artificial Sequence
  Chr7q_1 Forward Primer
cgggacctgagcagacata

SEQ ID NO: 6550 - DNA, 18 bp, Artificial Sequence
  Chr7q_1 Forward Primer
caaggagaacctggccct

SEQ ID NO: 6551 - DNA, 20 bp, Artificial Sequence
  Chr7q_1 Forward Primer
agtgagaggaagtggggagg

SEQ ID NO: 6552 - DNA, 20 bp, Artificial Sequence
  Chr7q_1 Forward Primer
ctggcctgtctgtcactctg

SEQ ID NO: 6553 - DNA, 20 bp, Artificial Sequence
  Chr7q_1 Forward Primer
agagcctagcattgctgtcc

SEQ ID NO: 6554 - DNA, 19 bp, Artificial Sequence
  Chr7q_1 Forward Primer
ctcagggtgggaaggagtg

SEQ ID NO: 6555 - DNA, 18 bp, Artificial Sequence
  Chr7q_1 Forward Primer
cagctgtcctgcccactg

SEQ ID NO: 6556 - DNA, 20 bp, Artificial Sequence
  Chr7q_1 Forward Primer
tgaagacaccctgccttttt

SEQ ID NO: 6557 - DNA, 20 bp, Artificial Sequence
  Chr7q_1 Forward Primer
ctaggagccaggtgatcagg

SEQ ID NO: 6558 - DNA, 20 bp, Artificial Sequence
  Chr7q_1 Forward Primer
gatgctctcccctcctttct

SEQ ID NO: 6559 - DNA, 20 bp, Artificial Sequence
  Chr7q_1 Forward Primer
tttggctgatgattgtggaa

SEQ ID NO: 6560 - DNA, 18 bp, Artificial Sequence
  Chr7q_1 Forward Primer
gatgtgggggcagcaact

SEQ ID NO: 6561 - DNA, 20 bp, Artificial Sequence
  Chr7q_1 Forward Primer
gacaccagaaccgctgagtt

SEQ ID NO: 6562 - DNA, 20 bp, Artificial Sequence
  Chr7q_1 Forward Primer
caggtctggacctttctcca

SEQ ID NO: 6563 - DNA, 20 bp, Artificial Sequence
  Chr7q_1 Forward Primer
agggagtgagacccctctgt

SEQ ID NO: 6564 - DNA, 20 bp, Artificial Sequence
  Chr7q_1 Forward Primer
acttgagggtctgcatcagg

SEQ ID NO: 6565 - DNA, 20 bp, Artificial Sequence
  Chr7q_1 Forward Primer
ggctcaaaccttcaccactg

SEQ ID NO: 6566 - DNA, 20 bp, Artificial Sequence
  Chr7q_1 Forward Primer
ggctcttgcagcaacataca

SEQ ID NO: 6567 - DNA, 20 bp, Artificial Sequence
  Chr7q_1 Forward Primer
accaccacttatcagccgtc

SEQ ID NO: 6568 - DNA, 20 bp, Artificial Sequence
  Chr7q_1 Forward Primer
gaaggaagagggagaaagcc

SEQ ID NO: 6569 - DNA, 20 bp, Artificial Sequence
  Chr7q_1 Forward Primer
aaaggattaaggctgggcat

SEQ ID NO: 6570 - DNA, 20 bp, Artificial Sequence
  Chr7q_1 Forward Primer
tacggagtaggccttgtgct

SEQ ID NO: 6571 - DNA, 20 bp, Artificial Sequence
  Chr7q_1 Forward Primer
tctcaaggagcccatgctat

SEQ ID NO: 6572 - DNA, 20 bp, Artificial Sequence
  Chr7q_1 Forward Primer
caagaggccaagtaggacca

SEQ ID NO: 6573 - DNA, 20 bp, Artificial Sequence
  Chr7q_1 Forward Primer
atctcacagccaactccctg

SEQ ID NO: 6574 - DNA, 20 bp, Artificial Sequence
  Chr7q_1 Forward Primer
gcctcaagcagccttgttta

SEQ ID NO: 6575 - DNA, 20 bp, Artificial Sequence
  Chr7q_1 Forward Primer
gcttggggaagtcacagaaa

SEQ ID NO: 6576 - DNA, 20 bp, Artificial Sequence
  Chr7q_1 Forward Primer
ggcctctttctcagacatcg

SEQ ID NO: 6577 - DNA, 20 bp, Artificial Sequence
  Chr7q_1 Forward Primer
ctccagttgttccccgtagt

SEQ ID NO: 6578 - DNA, 20 bp, Artificial Sequence
  Chr7q_1 Forward Primer
cgggtggtagagaaagcact

SEQ ID NO: 6579 - DNA, 20 bp, Artificial Sequence
  Chr7q_1 Forward Primer
cgtattactaagcggtcgcc

SEQ ID NO: 6580 - DNA, 20 bp, Artificial Sequence
  Chr7q_1 Forward Primer
taagttgccgacctctctgg

SEQ ID NO: 6581 - DNA, 20 bp, Artificial Sequence
  Chr7q_1 Forward Primer
gcagatcccagtggttgttt

SEQ ID NO: 6582 - DNA, 20 bp, Artificial Sequence
  Chr7q_1 Forward Primer
tgtccacttgtgtttctgcc

SEQ ID NO: 6583 - DNA, 20 bp, Artificial Sequence
  Chr7q_1 Forward Primer
tgccatgctgggtaagtatg

SEQ ID NO: 6584 - DNA, 20 bp, Artificial Sequence
  Chr7q_1 Forward Primer
cccagcagccatcttacttt

SEQ ID NO: 6585 - DNA, 20 bp, Artificial Sequence
  Chr7q_1 Forward Primer
cctaagttgagtggtgggga

SEQ ID NO: 6586 - DNA, 20 bp, Artificial Sequence
  Chr7q_1 Forward Primer
ctttaggacatggaccaggc

SEQ ID NO: 6587 - DNA, 20 bp, Artificial Sequence
  Chr7q_1 Forward Primer
tgacgggatcagatgtgtgt

SEQ ID NO: 6588 - DNA, 20 bp, Artificial Sequence
  Chr7q_1 Forward Primer
gcctgactaggtcccttcct

SEQ ID NO: 6589 - DNA, 20 bp, Artificial Sequence
  Chr7q_1 Forward Primer
cttctgtccaggtcctcagc

SEQ ID NO: 6590 - DNA, 20 bp, Artificial Sequence
  Chr7q_1 Forward Primer
agctccaaagttcagggtga

SEQ ID NO: 6591 - DNA, 20 bp, Artificial Sequence
  Chr7q_1 Forward Primer
tgggggactcaacaggtaag

SEQ ID NO: 6592 - DNA, 20 bp, Artificial Sequence
  Chr7q_1 Forward Primer
tttaggaagggtgagagggc

SEQ ID NO: 6593 - DNA, 20 bp, Artificial Sequence
  Chr7q_1 Forward Primer
agttctcccaggcaggattt

SEQ ID NO: 6594 - DNA, 20 bp, Artificial Sequence
  Chr7q_1 Forward Primer
agggagggtagtggcatagc

SEQ ID NO: 6595 - DNA, 20 bp, Artificial Sequence
  Chr7q_1 Forward Primer
tggagtgctcacatcctctg

SEQ ID NO: 6596 - DNA, 20 bp, Artificial Sequence
  Chr7q_1 Forward Primer
ccaagcctctcaggtcacat

SEQ ID NO: 6597 - DNA, 20 bp, Artificial Sequence
  Chr7q_1 Forward Primer
gcagaactcagacctgcctc

SEQ ID NO: 6598 - DNA, 20 bp, Artificial Sequence
  Chr7q_1 Forward Primer
ttccaacgagcctaatccag

SEQ ID NO: 6599 - DNA, 21 bp, Artificial Sequence
  Chr7q_1 Forward Primer
tgaaaacttggtgaggactgg

SEQ ID NO: 6600 - DNA, 20 bp, Artificial Sequence
  Chr7q_1 Forward Primer
ccaggggaagtacacattgc

SEQ ID NO: 6601 - DNA, 21 bp, Artificial Sequence
  Chr7q_1 Forward Primer
ggagcttctcccgttactgtc

SEQ ID NO: 6602 - DNA, 20 bp, Artificial Sequence
  Chr7q_1 Forward Primer
gatgactcctcctgtgtccc

SEQ ID NO: 6603 - DNA, 20 bp, Artificial Sequence
  Chr7q_1 Forward Primer
attgcattggtagaaagcgg

SEQ ID NO: 6604 - DNA, 20 bp, Artificial Sequence
  Chr7q_1 Forward Primer
ggggaatggtgaggaagagt

SEQ ID NO: 6605 - DNA, 20 bp, Artificial Sequence
  Chr7q_1 Forward Primer
ttccttttgtggagctctgg

SEQ ID NO: 6606 - DNA, 20 bp, Artificial Sequence
  Chr7q_1 Forward Primer
agtccgttttcccttcctgt

SEQ ID NO: 6607 - DNA, 20 bp, Artificial Sequence
  Chr7q_1 Forward Primer
cttttggtccatgtgggaag

SEQ ID NO: 6608 - DNA, 20 bp, Artificial Sequence
  Chr7q_1 Forward Primer
gaatcgctgttcaagaaggc

SEQ ID NO: 6609 - DNA, 20 bp, Artificial Sequence
  Chr7q_1 Forward Primer
cgaatactgcatctgggaca

SEQ ID NO: 6610 - DNA, 20 bp, Artificial Sequence
  Chr7q_1 Forward Primer
gacacctggggtcagaccta

SEQ ID NO: 6611 - DNA, 20 bp, Artificial Sequence
  Chr7q_1 Forward Primer
ctgcctcttcccgtacagac

SEQ ID NO: 6612 - DNA, 18 bp, Artificial Sequence
  Chr7q_1 Forward Primer
gggtccctaatgggtgct

SEQ ID NO: 6613 - DNA, 20 bp, Artificial Sequence
  Chr7q_1 Forward Primer
gcaggacttcaggaaagcac

SEQ ID NO: 6614 - DNA, 20 bp, Artificial Sequence
  Chr7q_1 Forward Primer
accttcctggaccttcacct

SEQ ID NO: 6615 - DNA, 20 bp, Artificial Sequence
  Chr7q_1 Forward Primer
agtaggggaatgagagacgg

SEQ ID NO: 6616 - DNA, 20 bp, Artificial Sequence
  Chr7q_1 Forward Primer
tgcaagccaatctcctacct

SEQ ID NO: 6617 - DNA, 20 bp, Artificial Sequence
  Chr7q_1 Forward Primer
cagaaatggccaaatgtcct

SEQ ID NO: 6618 - DNA, 20 bp, Artificial Sequence
  Chr7q_1 Forward Primer
ctaggggtcatggacgtagg

SEQ ID NO: 6619 - DNA, 20 bp, Artificial Sequence
  Chr7q_1 Forward Primer
actaagcagcagccttgagc

SEQ ID NO: 6620 - DNA, 20 bp, Artificial Sequence
  Chr7q_1 Forward Primer
cacaggtggctgctaagtca

SEQ ID NO: 6621 - DNA, 20 bp, Artificial Sequence
  Chr7q_1 Forward Primer
gcctgggtaccactcctttt

SEQ ID NO: 6622 - DNA, 20 bp, Artificial Sequence
  Chr7q_1 Forward Primer
caccctcagaaaggaaagca

SEQ ID NO: 6623 - DNA, 20 bp, Artificial Sequence
  Chr7q_1 Forward Primer
agatccctgttctcccctgt

SEQ ID NO: 6624 - DNA, 20 bp, Artificial Sequence
  Chr7q_1 Forward Primer
ccctgggtgctaagtacctg

SEQ ID NO: 6625 - DNA, 20 bp, Artificial Sequence
  Chr7q_1 Forward Primer
gtcctagaggggacagggag

SEQ ID NO: 6626 - DNA, 20 bp, Artificial Sequence
  Chr7q_1 Forward Primer
cttaactctgtgccgcctgt

SEQ ID NO: 6627 - DNA, 20 bp, Artificial Sequence
  Chr7q_1 Forward Primer
acaatcagccacctcctgac

SEQ ID NO: 6628 - DNA, 20 bp, Artificial Sequence
  Chr7q_1 Forward Primer
gggttcttgaagatgccagt

SEQ ID NO: 6629 - DNA, 20 bp, Artificial Sequence
  Chr7q_1 Forward Primer
gctgacgacttagagctgcc

SEQ ID NO: 6630 - DNA, 20 bp, Artificial Sequence
  Chr7q_1 Forward Primer
gacactcctaagcccaccag

SEQ ID NO: 6631 - DNA, 20 bp, Artificial Sequence
  Chr7q_1 Forward Primer
ggagaaggaaatcaggggag

SEQ ID NO: 6632 - DNA, 20 bp, Artificial Sequence
  Chr7q_1 Forward Primer
tgacagcgacatcatcatca

SEQ ID NO: 6633 - DNA, 20 bp, Artificial Sequence
  Chr7q_1 Forward Primer
gagagaggaaccttgcctga

SEQ ID NO: 6634 - DNA, 20 bp, Artificial Sequence
  Chr7q_1 Forward Primer
cacatcaccccatcaaagtg

SEQ ID NO: 6635 - DNA, 20 bp, Artificial Sequence
  Chr7q_1 Forward Primer
gcttttagaccgtgacaggc

SEQ ID NO: 6636 - DNA, 20 bp, Artificial Sequence
  Chr7q_1 Forward Primer
ggtgcctctcttgacctcag

SEQ ID NO: 6637 - DNA, 20 bp, Artificial Sequence
  Chr7q_1 Forward Primer
gcaggtcaagtctaccctgg

SEQ ID NO: 6638 - DNA, 20 bp, Artificial Sequence
  Chr7q_1 Forward Primer
cactcccccacacctacaac

SEQ ID NO: 6639 - DNA, 20 bp, Artificial Sequence
  Chr7q_1 Forward Primer
cactagcttccccagacagc

SEQ ID NO: 6640 - DNA, 20 bp, Artificial Sequence
  Chr7q_1 Forward Primer
tgttccactgtgcctctgtc

SEQ ID NO: 6641 - DNA, 18 bp, Artificial Sequence
  Chr7q_1 Reverse Primer
ccctcccgctcttaaagg

SEQ ID NO: 6642 - DNA, 20 bp, Artificial Sequence
  Chr7q_1 Reverse Primer
cccttacagaacgtgggtgt

SEQ ID NO: 6643 - DNA, 20 bp, Artificial Sequence
  Chr7q_1 Reverse Primer
ttccttgtctctagcagggc

SEQ ID NO: 6644 - DNA, 20 bp, Artificial Sequence
  Chr7q_1 Reverse Primer
tggacagcttccctctcact

SEQ ID NO: 6645 - DNA, 20 bp, Artificial Sequence
  Chr7q_1 Reverse Primer
acaggtgaagggacgatgac

SEQ ID NO: 6646 - DNA, 20 bp, Artificial Sequence
  Chr7q_1 Reverse Primer
caactcccatccatcagagc

SEQ ID NO: 6647 - DNA, 20 bp, Artificial Sequence
  Chr7q_1 Reverse Primer
tatttccctttcccctggtc

SEQ ID NO: 6648 - DNA, 20 bp, Artificial Sequence
  Chr7q_1 Reverse Primer
cccagcctgaggtgtaagaa

SEQ ID NO: 6649 - DNA, 20 bp, Artificial Sequence
  Chr7q_1 Reverse Primer
ttaacatgtccttcgggagc

SEQ ID NO: 6650 - DNA, 20 bp, Artificial Sequence
  Chr7q_1 Reverse Primer
cagctcctgcagcttctctg

SEQ ID NO: 6651 - DNA, 20 bp, Artificial Sequence
  Chr7q_1 Reverse Primer
tcaagtttgtctaggccccc

SEQ ID NO: 6652 - DNA, 20 bp, Artificial Sequence
  Chr7q_1 Reverse Primer
gggaaaggtaggctcaggac

SEQ ID NO: 6653 - DNA, 20 bp, Artificial Sequence
  Chr7q_1 Reverse Primer
gccctcaaaaagcttccatt

SEQ ID NO: 6654 - DNA, 20 bp, Artificial Sequence
  Chr7q_1 Reverse Primer
aacccaggaaaagatgcgta

SEQ ID NO: 6655 - DNA, 20 bp, Artificial Sequence
  Chr7q_1 Reverse Primer
agctaccccaacaccttcct

SEQ ID NO: 6656 - DNA, 20 bp, Artificial Sequence
  Chr7q_1 Reverse Primer
tgaagtgccagcagtgaaga

SEQ ID NO: 6657 - DNA, 20 bp, Artificial Sequence
  Chr7q_1 Reverse Primer
agggaaccatgcattttcag

SEQ ID NO: 6658 - DNA, 20 bp, Artificial Sequence
  Chr7q_1 Reverse Primer
gtgcaagacaaggtgtgtgg

SEQ ID NO: 6659 - DNA, 20 bp, Artificial Sequence
  Chr7q_1 Reverse Primer
gctgcaccttccagaacatt

SEQ ID NO: 6660 - DNA, 20 bp, Artificial Sequence
  Chr7q_1 Reverse Primer
gaaaccaagatggggaaggt

SEQ ID NO: 6661 - DNA, 20 bp, Artificial Sequence
  Chr7q_1 Reverse Primer
ttagacacaaccagaggccc

SEQ ID NO: 6662 - DNA, 20 bp, Artificial Sequence
  Chr7q_1 Reverse Primer
accgtttttcccatagcaga

SEQ ID NO: 6663 - DNA, 20 bp, Artificial Sequence
  Chr7q_1 Reverse Primer
gtgcacctctgtatgagcca

SEQ ID NO: 6664 - DNA, 20 bp, Artificial Sequence
  Chr7q_1 Reverse Primer
acaggcgtggttcctaaatg

SEQ ID NO: 6665 - DNA, 20 bp, Artificial Sequence
  Chr7q_1 Reverse Primer
aatgtgtgggaggctttttg

SEQ ID NO: 6666 - DNA, 20 bp, Artificial Sequence
  Chr7q_1 Reverse Primer
tctcagtcaagatcccagcc

SEQ ID NO: 6667 - DNA, 20 bp, Artificial Sequence
  Chr7q_1 Reverse Primer
caaaactgcagcaagtggag

SEQ ID NO: 6668 - DNA, 20 bp, Artificial Sequence
  Chr7q_1 Reverse Primer
ctgttcgggactgagtgtga

SEQ ID NO: 6669 - DNA, 20 bp, Artificial Sequence
  Chr7q_1 Reverse Primer
ggctttgggagtacacagga

SEQ ID NO: 6670 - DNA, 20 bp, Artificial Sequence
  Chr7q_1 Reverse Primer
cataatgctagcagggccag

SEQ ID NO: 6671 - DNA, 20 bp, Artificial Sequence
  Chr7q_1 Reverse Primer
cttgcttccagatgtggtca

SEQ ID NO: 6672 - DNA, 20 bp, Artificial Sequence
  Chr7q_1 Reverse Primer
gagaagggaaggggagtgtc

SEQ ID NO: 6673 - DNA, 20 bp, Artificial Sequence
  Chr7q_1 Reverse Primer
agtatgatcgcggcctactc

SEQ ID NO: 6674 - DNA, 20 bp, Artificial Sequence
  Chr7q_1 Reverse Primer
gctgttaccttggaggttgc

SEQ ID NO: 6675 - DNA, 20 bp, Artificial Sequence
  Chr7q_1 Reverse Primer
gaggaataattcagacgcgg

SEQ ID NO: 6676 - DNA, 20 bp, Artificial Sequence
  Chr7q_1 Reverse Primer
ccacgataagcatcctacgg

SEQ ID NO: 6677 - DNA, 20 bp, Artificial Sequence
  Chr7q_1 Reverse Primer
ggatcaatcatcccgaggta

SEQ ID NO: 6678 - DNA, 20 bp, Artificial Sequence
  Chr7q_1 Reverse Primer
acagctggaagacatgacca

SEQ ID NO: 6679 - DNA, 20 bp, Artificial Sequence
  Chr7q_1 Reverse Primer
gatgcaaccatcaaatgtgc

SEQ ID NO: 6680 - DNA, 20 bp, Artificial Sequence
  Chr7q_1 Reverse Primer
cccacaccacaccaaaaact

SEQ ID NO: 6681 - DNA, 20 bp, Artificial Sequence
  Chr7q_1 Reverse Primer
ccccttccgaaacatacaga

SEQ ID NO: 6682 - DNA, 20 bp, Artificial Sequence
  Chr7q_1 Reverse Primer
atctcagacccctttcccac

SEQ ID NO: 6683 - DNA, 20 bp, Artificial Sequence
  Chr7q_1 Reverse Primer
atgtcttccttcctgccctt

SEQ ID NO: 6684 - DNA, 20 bp, Artificial Sequence
  Chr7q_1 Reverse Primer
gggacacctcaatttcctca

SEQ ID NO: 6685 - DNA, 20 bp, Artificial Sequence
  Chr7q_1 Reverse Primer
tcactctgctcagtccatgc

SEQ ID NO: 6686 - DNA, 20 bp, Artificial Sequence
  Chr7q_1 Reverse Primer
agggtacagctgcaggacag

SEQ ID NO: 6687 - DNA, 20 bp, Artificial Sequence
  Chr7q_1 Reverse Primer
ggaaatcagtcgcatcacct

SEQ ID NO: 6688 - DNA, 20 bp, Artificial Sequence
  Chr7q_1 Reverse Primer
agcaactcccctcattctca

SEQ ID NO: 6689 - DNA, 20 bp, Artificial Sequence
  Chr7q_1 Reverse Primer
gctcacttctttgctttggc

SEQ ID NO: 6690 - DNA, 20 bp, Artificial Sequence
  Chr7q_1 Reverse Primer
ggtataaaggtcgaaggccc

SEQ ID NO: 6691 - DNA, 20 bp, Artificial Sequence
  Chr7q_1 Reverse Primer
tcctgattttcactcagccc

SEQ ID NO: 6692 - DNA, 20 bp, Artificial Sequence
  Chr7q_1 Reverse Primer
ggcagcatcagaaaagaagg

SEQ ID NO: 6693 - DNA, 20 bp, Artificial Sequence
  Chr7q_1 Reverse Primer
gtgaaggaagcgtcaaggag

SEQ ID NO: 6694 - DNA, 20 bp, Artificial Sequence
  Chr7q_1 Reverse Primer
aggaaaatcaacatgagcgg

SEQ ID NO: 6695 - DNA, 20 bp, Artificial Sequence
  Chr7q_1 Reverse Primer
acatgcattttgggctcatt

SEQ ID NO: 6696 - DNA, 20 bp, Artificial Sequence
  Chr7q_1 Reverse Primer
agcctacagaacgagggatg

SEQ ID NO: 6697 - DNA, 20 bp, Artificial Sequence
  Chr7q_1 Reverse Primer
acaggtcccaagagaagtgg

SEQ ID NO: 6698 - DNA, 20 bp, Artificial Sequence
  Chr7q_1 Reverse Primer
ggagggtctgaaaaggaagg

SEQ ID NO: 6699 - DNA, 20 bp, Artificial Sequence
  Chr7q_1 Reverse Primer
caaatgctccaccttcccta

SEQ ID NO: 6700 - DNA, 20 bp, Artificial Sequence
  Chr7q_1 Reverse Primer
tccctgtgcagaaaaggaat

SEQ ID NO: 6701 - DNA, 20 bp, Artificial Sequence
  Chr7q_1 Reverse Primer
ctcttcccaactttgcttgg

SEQ ID NO: 6702 - DNA, 20 bp, Artificial Sequence
  Chr7q_1 Reverse Primer
cctctcctatcacagccagc

SEQ ID NO: 6703 - DNA, 20 bp, Artificial Sequence
  Chr7q_1 Reverse Primer
ctctcaaggcctggaatctg

SEQ ID NO: 6704 - DNA, 20 bp, Artificial Sequence
  Chr7q_1 Reverse Primer
gctacctcctcctcctcacc

SEQ ID NO: 6705 - DNA, 19 bp, Artificial Sequence
  Chr7q_1 Reverse Primer
ctatttccagccaccccag

SEQ ID NO: 6706 - DNA, 20 bp, Artificial Sequence
  Chr7q_1 Reverse Primer
atggtgctgcttttcaggtt

SEQ ID NO: 6707 - DNA, 20 bp, Artificial Sequence
  Chr7q_1 Reverse Primer
ctagaagccacccaaactgc

SEQ ID NO: 6708 - DNA, 18 bp, Artificial Sequence
  Chr7q_1 Reverse Primer
aacccaaccctgaggagg

SEQ ID NO: 6709 - DNA, 20 bp, Artificial Sequence
  Chr7q_1 Reverse Primer
agtgttctctgcatggtccc

SEQ ID NO: 6710 - DNA, 20 bp, Artificial Sequence
  Chr7q_1 Reverse Primer
gcatttccccagagactgaa

SEQ ID NO: 6711 - DNA, 20 bp, Artificial Sequence
  Chr7q_1 Reverse Primer
cactaacctcgccctttctg

SEQ ID NO: 6712 - DNA, 20 bp, Artificial Sequence
  Chr7q_1 Reverse Primer
ggctgtgagttccaggagag

SEQ ID NO: 6713 - DNA, 20 bp, Artificial Sequence
  Chr7q_1 Reverse Primer
agaccccttgtaaggcaggt

SEQ ID NO: 6714 - DNA, 19 bp, Artificial Sequence
  Chr7q_1 Reverse Primer
ccaatgctgctgctgaact

SEQ ID NO: 6715 - DNA, 20 bp, Artificial Sequence
  Chr7q_1 Reverse Primer
ctccacgctgtccagaaagt

SEQ ID NO: 6716 - DNA, 20 bp, Artificial Sequence
  Chr7q_1 Reverse Primer
ttggagtgggtgtgcattta

SEQ ID NO: 6717 - DNA, 20 bp, Artificial Sequence
  Chr7q_1 Reverse Primer
cccctcacctctgctaaaga

SEQ ID NO: 6718 - DNA, 20 bp, Artificial Sequence
  Chr7q_1 Reverse Primer
ccctttctacctccccagag

SEQ ID NO: 6719 - DNA, 20 bp, Artificial Sequence
  Chr7q_1 Reverse Primer
gccagctgctccacaattac

SEQ ID NO: 6720 - DNA, 20 bp, Artificial Sequence
  Chr7q_1 Reverse Primer
ctgccagctttagggagatg

SEQ ID NO: 6721 - DNA, 20 bp, Artificial Sequence
  Chr7q_1 Reverse Primer
tgggctattttgggtctgag

SEQ ID NO: 6722 - DNA, 20 bp, Artificial Sequence
  Chr7q_1 Reverse Primer
agctgtctgctccacacctt

SEQ ID NO: 6723 - DNA, 20 bp, Artificial Sequence
  Chr7q_1 Reverse Primer
ctcagaaggcaaaatgggtc

SEQ ID NO: 6724 - DNA, 20 bp, Artificial Sequence
  Chr7q_1 Reverse Primer
acactgagagatgccaggct

SEQ ID NO: 6725 - DNA, 20 bp, Artificial Sequence
  Chr7q_1 Reverse Primer
ccagccccaagaaggtattt

SEQ ID NO: 6726 - DNA, 20 bp, Artificial Sequence
  Chr7q_1 Reverse Primer
gcttcattgacaagatcgca

SEQ ID NO: 6727 - DNA, 20 bp, Artificial Sequence
  Chr7q_1 Reverse Primer
acgaatgaaccgttttgagg

SEQ ID NO: 6728 - DNA, 20 bp, Artificial Sequence
  Chr7q_1 Reverse Primer
atcttactgtggctgggagc

SEQ ID NO: 6729 - DNA, 20 bp, Artificial Sequence
  Chr7q_1 Reverse Primer
cacagggccaggagagtaga

SEQ ID NO: 6730 - DNA, 20 bp, Artificial Sequence
  Chr7q_1 Reverse Primer
gtctgtagggagcttggtgg

SEQ ID NO: 6731 - DNA, 20 bp, Artificial Sequence
  Chr7q_1 Reverse Primer
ttctccatccaccctttgtc

SEQ ID NO: 6732 - DNA, 20 bp, Artificial Sequence
  Chr7q_1 Reverse Primer
atctaccctggccctgatct

SEQ ID NO: 6733 - DNA, 20 bp, Artificial Sequence
  Chr7q_1 Reverse Primer
agggcagcaggataaagagc

SEQ ID NO: 6734 - DNA, 20 bp, Artificial Sequence
  Chr7q_1 Reverse Primer
ccatggctccaataggaatg

SEQ ID NO: 6735 - DNA, 20 bp, Artificial Sequence
  Chr7q_1 Reverse Primer
gggaaggatctgaaagggaa

SEQ ID NO: 6736 - DNA, 20 bp, Artificial Sequence
  Chr7q_1 Reverse Primer
acagacagtggttgggaagg

SEQ ID NO: 6737 - DNA, 20 bp, Artificial Sequence
  Chr7q_2 Forward Primer
cttctcatccatccttccca

SEQ ID NO: 6738 - DNA, 23 bp, Artificial Sequence
  Chr7q_2 Forward Primer
ctgtttgtcagtgatcctctcag

SEQ ID NO: 6739 - DNA, 26 bp, Artificial Sequence
  Chr7q_2 Forward Primer
ttttcctctactttttcaggttactg

SEQ ID NO: 6740 - DNA, 23 bp, Artificial Sequence
  Chr7q_2 Forward Primer
aactataaccactgaagccaacg

SEQ ID NO: 6741 - DNA, 21 bp, Artificial Sequence
  Chr7q_2 Forward Primer
aaaggcatgcattccatagag

SEQ ID NO: 6742 - DNA, 20 bp, Artificial Sequence
  Chr7q_2 Forward Primer
tgctagacggagcatgaaag

SEQ ID NO: 6743 - DNA, 20 bp, Artificial Sequence
  Chr7q_2 Forward Primer
cctccaacttttgacaggga

SEQ ID NO: 6744 - DNA, 22 bp, Artificial Sequence
  Chr7q_2 Forward Primer
gggaatgaggaaaagacaatca

SEQ ID NO: 6745 - DNA, 20 bp, Artificial Sequence
  Chr7q_2 Forward Primer
gtggagaagactggtttggg

SEQ ID NO: 6746 - DNA, 20 bp, Artificial Sequence
  Chr7q_2 Forward Primer
tggacaagatgcacacagaa

SEQ ID NO: 6747 - DNA, 23 bp, Artificial Sequence
  Chr7q_2 Forward Primer
ccatctttccagaatctgtcttg

SEQ ID NO: 6748 - DNA, 20 bp, Artificial Sequence
  Chr7q_2 Forward Primer
agctccgggatgtatctcct

SEQ ID NO: 6749 - DNA, 23 bp, Artificial Sequence
  Chr7q_2 Forward Primer
aagcttgtcacatcatagatgcc

SEQ ID NO: 6750 - DNA, 20 bp, Artificial Sequence
  Chr7q_2 Forward Primer
ttggggaatctcaagaatgg

SEQ ID NO: 6751 - DNA, 20 bp, Artificial Sequence
  Chr7q_2 Forward Primer
aagctcaagactgggtctgc

SEQ ID NO: 6752 - DNA, 22 bp, Artificial Sequence
  Chr7q_2 Forward Primer
tgttgatcacactgaatggaca

SEQ ID NO: 6753 - DNA, 20 bp, Artificial Sequence
  Chr7q_2 Forward Primer
actttggtccctgttcgaga

SEQ ID NO: 6754 - DNA, 20 bp, Artificial Sequence
  Chr7q_2 Forward Primer
aaacaggcagcattgaggtt

SEQ ID NO: 6755 - DNA, 21 bp, Artificial Sequence
  Chr7q_2 Forward Primer
aaagtcatgatgccaagatgg

SEQ ID NO: 6756 - DNA, 23 bp, Artificial Sequence
  Chr7q_2 Forward Primer
tgtttatttctaacttggtgggc

SEQ ID NO: 6757 - DNA, 21 bp, Artificial Sequence
  Chr7q_2 Forward Primer
tttgcacacctcattttaggg

SEQ ID NO: 6758 - DNA, 20 bp, Artificial Sequence
  Chr7q_2 Forward Primer
cacactttgctcagtctgcc

SEQ ID NO: 6759 - DNA, 20 bp, Artificial Sequence
  Chr7q_2 Forward Primer
gatggcaggagcaaaaagag

SEQ ID NO: 6760 - DNA, 20 bp, Artificial Sequence
  Chr7q_2 Forward Primer
ggatggagagggaggaagtc

SEQ ID NO: 6761 - DNA, 21 bp, Artificial Sequence
  Chr7q_2 Forward Primer
tggatttatcttcctccgctt

SEQ ID NO: 6762 - DNA, 24 bp, Artificial Sequence
  Chr7q_2 Forward Primer
gaacacagctttgagcaaaaatta

SEQ ID NO: 6763 - DNA, 21 bp, Artificial Sequence
  Chr7q_2 Forward Primer
aaaaaggccaaacctgtcttt

SEQ ID NO: 6764 - DNA, 20 bp, Artificial Sequence
  Chr7q_2 Forward Primer
agaattgtgagctctcgtgc

SEQ ID NO: 6765 - DNA, 20 bp, Artificial Sequence
  Chr7q_2 Forward Primer
cttggcagcacagtggacta

SEQ ID NO: 6766 - DNA, 20 bp, Artificial Sequence
  Chr7q_2 Forward Primer
ccgtgtttattcaatgccct

SEQ ID NO: 6767 - DNA, 21 bp, Artificial Sequence
  Chr7q_2 Forward Primer
ttcatccattgtactgggctc

SEQ ID NO: 6768 - DNA, 20 bp, Artificial Sequence
  Chr7q_2 Forward Primer
gccagcattctgaagcctta

SEQ ID NO: 6769 - DNA, 21 bp, Artificial Sequence
  Chr7q_2 Forward Primer
tgtttccctgatttcagtcca

SEQ ID NO: 6770 - DNA, 20 bp, Artificial Sequence
  Chr7q_2 Forward Primer
ctcggttctgccaaatcaat

SEQ ID NO: 6771 - DNA, 20 bp, Artificial Sequence
  Chr7q_2 Forward Primer
tgcgagtgtgaccttctttg

SEQ ID NO: 6772 - DNA, 20 bp, Artificial Sequence
  Chr7q_2 Forward Primer
cggcagcactatgaccattt

SEQ ID NO: 6773 - DNA, 25 bp, Artificial Sequence
  Chr7q_2 Forward Primer
tgttgtcattagtgatattttggga

SEQ ID NO: 6774 - DNA, 20 bp, Artificial Sequence
  Chr7q_2 Forward Primer
aatgccctttttggtaggaa

SEQ ID NO: 6775 - DNA, 20 bp, Artificial Sequence
  Chr7q_2 Forward Primer
gcacgaagcttggcatagat

SEQ ID NO: 6776 - DNA, 21 bp, Artificial Sequence
  Chr7q_2 Forward Primer
tcttccagacaaggtctgagc

SEQ ID NO: 6777 - DNA, 20 bp, Artificial Sequence
  Chr7q_2 Forward Primer
ttggcatgcacgttatgaat

SEQ ID NO: 6778 - DNA, 21 bp, Artificial Sequence
  Chr7q_2 Forward Primer
caaacattttgtgaacccagg

SEQ ID NO: 6779 - DNA, 20 bp, Artificial Sequence
  Chr7q_2 Forward Primer
tctctccccttcccaaatct

SEQ ID NO: 6780 - DNA, 22 bp, Artificial Sequence
  Chr7q_2 Forward Primer
tctaaggcctttaaccttgctt

SEQ ID NO: 6781 - DNA, 26 bp, Artificial Sequence
  Chr7q_2 Forward Primer
aaattcaaggttctagatagtcagca

SEQ ID NO: 6782 - DNA, 22 bp, Artificial Sequence
  Chr7q_2 Forward Primer
ttgccctaatatgtgcttacca

SEQ ID NO: 6783 - DNA, 24 bp, Artificial Sequence
  Chr7q_2 Forward Primer
gcagatactgagcgtaaaaatgaa

SEQ ID NO: 6784 - DNA, 20 bp, Artificial Sequence
  Chr7q_2 Forward Primer
agcatgcattgctgactgtt

SEQ ID NO: 6785 - DNA, 21 bp, Artificial Sequence
  Chr7q_2 Forward Primer
tgaggacacacaccaagatga

SEQ ID NO: 6786 - DNA, 23 bp, Artificial Sequence
  Chr7q_2 Forward Primer
aacctgggatcaagtttcttctc

SEQ ID NO: 6787 - DNA, 20 bp, Artificial Sequence
  Chr7q_2 Forward Primer
accacgggaactctcatcac

SEQ ID NO: 6788 - DNA, 20 bp, Artificial Sequence
  Chr7q_2 Forward Primer
tgcctccatctgaaacttcc

SEQ ID NO: 6789 - DNA, 20 bp, Artificial Sequence
  Chr7q_2 Forward Primer
ttttagaccatgcccagagg

SEQ ID NO: 6790 - DNA, 22 bp, Artificial Sequence
  Chr7q_2 Forward Primer
tcaggtgaattctcttgggttt

SEQ ID NO: 6791 - DNA, 20 bp, Artificial Sequence
  Chr7q_2 Forward Primer
tcacaaacagccacatccat

SEQ ID NO: 6792 - DNA, 20 bp, Artificial Sequence
  Chr7q_2 Forward Primer
gattttatcctcggggcaat

SEQ ID NO: 6793 - DNA, 20 bp, Artificial Sequence
  Chr7q_2 Forward Primer
taagcaacaaacccatgcaa

SEQ ID NO: 6794 - DNA, 22 bp, Artificial Sequence
  Chr7q_2 Forward Primer
tccaaagctgcatgtttatacc

SEQ ID NO: 6795 - DNA, 20 bp, Artificial Sequence
  Chr7q_2 Forward Primer
tgtgaagcagccaaaatgtc

SEQ ID NO: 6796 - DNA, 22 bp, Artificial Sequence
  Chr7q_2 Forward Primer
tgcatggaatgaatttagttgg

SEQ ID NO: 6797 - DNA, 21 bp, Artificial Sequence
  Chr7q_2 Forward Primer
aacaggctggttggacttttt

SEQ ID NO: 6798 - DNA, 20 bp, Artificial Sequence
  Chr7q_2 Forward Primer
caccaacctccagtaggcat

SEQ ID NO: 6799 - DNA, 20 bp, Artificial Sequence
  Chr7q_2 Forward Primer
ttcctggatcccatgacttt

SEQ ID NO: 6800 - DNA, 20 bp, Artificial Sequence
  Chr7q_2 Forward Primer
tttggttgtaggcaagggag

SEQ ID NO: 6801 - DNA, 25 bp, Artificial Sequence
  Chr7q_2 Forward Primer
tttgaacggtgttgtagaacaaata

SEQ ID NO: 6802 - DNA, 21 bp, Artificial Sequence
  Chr7q_2 Forward Primer
tttttcccttagactcagcca

SEQ ID NO: 6803 - DNA, 20 bp, Artificial Sequence
  Chr7q_2 Forward Primer
gcccaaatggcataaaacac

SEQ ID NO: 6804 - DNA, 20 bp, Artificial Sequence
  Chr7q_2 Forward Primer
ttccttgctagagggactgg

SEQ ID NO: 6805 - DNA, 20 bp, Artificial Sequence
  Chr7q_2 Forward Primer
aattggagatgtttcgcagg

SEQ ID NO: 6806 - DNA, 20 bp, Artificial Sequence
  Chr7q_2 Forward Primer
gctggctgaaacacacagaa

SEQ ID NO: 6807 - DNA, 27 bp, Artificial Sequence
  Chr7q_2 Forward Primer
catagaagacaatttcattttatttcc

SEQ ID NO: 6808 - DNA, 21 bp, Artificial Sequence
  Chr7q_2 Forward Primer
tgccatctcttgctagactgt

SEQ ID NO: 6809 - DNA, 20 bp, Artificial Sequence
  Chr7q_2 Forward Primer
gtttgttctggggaagcaga

SEQ ID NO: 6810 - DNA, 21 bp, Artificial Sequence
  Chr7q_2 Forward Primer
tctgattccagagagactgcc

SEQ ID NO: 6811 - DNA, 20 bp, Artificial Sequence
  Chr7q_2 Forward Primer
agtgaattcctcctggcaga

SEQ ID NO: 6812 - DNA, 20 bp, Artificial Sequence
  Chr7q_2 Forward Primer
tgatgtaaccttccctccca

SEQ ID NO: 6813 - DNA, 22 bp, Artificial Sequence
  Chr7q_2 Forward Primer
ttcgccatttatttaaaacctt

SEQ ID NO: 6814 - DNA, 20 bp, Artificial Sequence
  Chr7q_2 Forward Primer
caaaatcccggttagcacag

SEQ ID NO: 6815 - DNA, 20 bp, Artificial Sequence
  Chr7q_2 Forward Primer
gccttgaagttggcattctt

SEQ ID NO: 6816 - DNA, 22 bp, Artificial Sequence
  Chr7q_2 Forward Primer
tcaatcataaacatttggtgcc

SEQ ID NO: 6817 - DNA, 20 bp, Artificial Sequence
  Chr7q_2 Forward Primer
aactaaactcctggggccat

SEQ ID NO: 6818 - DNA, 20 bp, Artificial Sequence
  Chr7q_2 Forward Primer
ctgcaggcttttatttggga

SEQ ID NO: 6819 - DNA, 20 bp, Artificial Sequence
  Chr7q_2 Forward Primer
ggcaaggatggagaagacaa

SEQ ID NO: 6820 - DNA, 20 bp, Artificial Sequence
  Chr7q_2 Forward Primer
ttgtgtcaaaaggcagagca

SEQ ID NO: 6821 - DNA, 21 bp, Artificial Sequence
  Chr7q_2 Forward Primer
tgtcaaccaattgcctatgtg

SEQ ID NO: 6822 - DNA, 20 bp, Artificial Sequence
  Chr7q_2 Forward Primer
ctgccacatttcacagccta

SEQ ID NO: 6823 - DNA, 20 bp, Artificial Sequence
  Chr7q_2 Forward Primer
ccaaggcaaattttcttcca

SEQ ID NO: 6824 - DNA, 20 bp, Artificial Sequence
  Chr7q_2 Forward Primer
ctccagtgagaccaaggtgg

SEQ ID NO: 6825 - DNA, 21 bp, Artificial Sequence
  Chr7q_2 Forward Primer
tcaagtttttcatggcttgct

SEQ ID NO: 6826 - DNA, 20 bp, Artificial Sequence
  Chr7q_2 Forward Primer
gtccacctggtcacctctgt

SEQ ID NO: 6827 - DNA, 20 bp, Artificial Sequence
  Chr7q_2 Forward Primer
tgacctgggtccaataagga

SEQ ID NO: 6828 - DNA, 23 bp, Artificial Sequence
  Chr7q_2 Forward Primer
tccaaccaaatagaaacttttga

SEQ ID NO: 6829 - DNA, 20 bp, Artificial Sequence
  Chr7q_2 Forward Primer
ataaatggaacagcccatcc

SEQ ID NO: 6830 - DNA, 21 bp, Artificial Sequence
  Chr7q_2 Forward Primer
tccataggacattttcaccaa

SEQ ID NO: 6831 - DNA, 21 bp, Artificial Sequence
  Chr7q_2 Forward Primer
gccgtaacagtttcagctcag

SEQ ID NO: 6832 - DNA, 21 bp, Artificial Sequence
  Chr7q_2 Forward Primer
aacggataacacccacattca

SEQ ID NO: 6833 - DNA, 20 bp, Artificial Sequence
  Chr7q_2 Reverse Primer
tagggatcttccccattgct

SEQ ID NO: 6834 - DNA, 24 bp, Artificial Sequence
  Chr7q_2 Reverse Primer
tttcactttaaaggagggaaactg

SEQ ID NO: 6835 - DNA, 22 bp, Artificial Sequence
  Chr7q_2 Reverse Primer
aaccaaatagaatccctcagca

SEQ ID NO: 6836 - DNA, 20 bp, Artificial Sequence
  Chr7q_2 Reverse Primer
tttccctggaaggtactggt

SEQ ID NO: 6837 - DNA, 20 bp, Artificial Sequence
  Chr7q_2 Reverse Primer
atgatttggagcatcaaggc

SEQ ID NO: 6838 - DNA, 23 bp, Artificial Sequence
  Chr7q_2 Reverse Primer
gcaattaaattccaaaatgtgaa

SEQ ID NO: 6839 - DNA, 20 bp, Artificial Sequence
  Chr7q_2 Reverse Primer
agcagtttggcagctctagg

SEQ ID NO: 6840 - DNA, 22 bp, Artificial Sequence
  Chr7q_2 Reverse Primer
tcctcatttgctaccactgtgt

SEQ ID NO: 6841 - DNA, 20 bp, Artificial Sequence
  Chr7q_2 Reverse Primer
tcccaactctaagctgccat

SEQ ID NO: 6842 - DNA, 20 bp, Artificial Sequence
  Chr7q_2 Reverse Primer
ctggttatatgtcccgccac

SEQ ID NO: 6843 - DNA, 22 bp, Artificial Sequence
  Chr7q_2 Reverse Primer
ggagacgagaagaaaacaagga

SEQ ID NO: 6844 - DNA, 20 bp, Artificial Sequence
  Chr7q_2 Reverse Primer
catggtttcctcttctgcaa

SEQ ID NO: 6845 - DNA, 20 bp, Artificial Sequence
  Chr7q_2 Reverse Primer
gaatgcaagatctgtggtgc

SEQ ID NO: 6846 - DNA, 20 bp, Artificial Sequence
  Chr7q_2 Reverse Primer
gtagaggcagagggtgttgg

SEQ ID NO: 6847 - DNA, 25 bp, Artificial Sequence
  Chr7q_2 Reverse Primer
tttgtgaatagctgtgtctttagga

SEQ ID NO: 6848 - DNA, 20 bp, Artificial Sequence
  Chr7q_2 Reverse Primer
gcagaaaagggagttagcca

SEQ ID NO: 6849 - DNA, 20 bp, Artificial Sequence
  Chr7q_2 Reverse Primer
atgatttccttgcatcctgg

SEQ ID NO: 6850 - DNA, 26 bp, Artificial Sequence
  Chr7q_2 Reverse Primer
tgaaacttaaaacaaaattccagaaa

SEQ ID NO: 6851 - DNA, 25 bp, Artificial Sequence
  Chr7q_2 Reverse Primer
gcattgaaatttaggagaaaactga

SEQ ID NO: 6852 - DNA, 20 bp, Artificial Sequence
  Chr7q_2 Reverse Primer
atagagtcgagggacctggg

SEQ ID NO: 6853 - DNA, 21 bp, Artificial Sequence
  Chr7q_2 Reverse Primer
tggatgagacactgaaccaaa

SEQ ID NO: 6854 - DNA, 20 bp, Artificial Sequence
  Chr7q_2 Reverse Primer
cccgttcttatgctggtgtt

SEQ ID NO: 6855 - DNA, 20 bp, Artificial Sequence
  Chr7q_2 Reverse Primer
ttcatctgggacaaacacga

SEQ ID NO: 6856 - DNA, 20 bp, Artificial Sequence
  Chr7q_2 Reverse Primer
ggctaagagaagcacatgcc

SEQ ID NO: 6857 - DNA, 20 bp, Artificial Sequence
  Chr7q_2 Reverse Primer
taggcagtgtgaatgcaagg

SEQ ID NO: 6858 - DNA, 22 bp, Artificial Sequence
  Chr7q_2 Reverse Primer
tctgctgaagaagactggagaa

SEQ ID NO: 6859 - DNA, 21 bp, Artificial Sequence
  Chr7q_2 Reverse Primer
aacacaccacctgcttctagg

SEQ ID NO: 6860 - DNA, 23 bp, Artificial Sequence
  Chr7q_2 Reverse Primer
ccagtagagagttacgggttgaa

SEQ ID NO: 6861 - DNA, 20 bp, Artificial Sequence
  Chr7q_2 Reverse Primer
agcttgatgcaccgtttctt

SEQ ID NO: 6862 - DNA, 20 bp, Artificial Sequence
  Chr7q_2 Reverse Primer
ctgtgaggttccagggaaaa

SEQ ID NO: 6863 - DNA, 20 bp, Artificial Sequence
  Chr7q_2 Reverse Primer
ccagaagtagggggaaatga

SEQ ID NO: 6864 - DNA, 20 bp, Artificial Sequence
  Chr7q_2 Reverse Primer
ctgggaagaaagagccttga

SEQ ID NO: 6865 - DNA, 20 bp, Artificial Sequence
  Chr7q_2 Reverse Primer
atcagtgagggcagaggttg

SEQ ID NO: 6866 - DNA, 20 bp, Artificial Sequence
  Chr7q_2 Reverse Primer
gaccctcccacggtttaact

SEQ ID NO: 6867 - DNA, 20 bp, Artificial Sequence
  Chr7q_2 Reverse Primer
ttagctcatggtggttgctg

SEQ ID NO: 6868 - DNA, 20 bp, Artificial Sequence
  Chr7q_2 Reverse Primer
tgaaaccccaaagctgatct

SEQ ID NO: 6869 - DNA, 25 bp, Artificial Sequence
  Chr7q_2 Reverse Primer
gacatgggttataacgtttttgttt

SEQ ID NO: 6870 - DNA, 22 bp, Artificial Sequence
  Chr7q_2 Reverse Primer
cggttgctacacttgtgatttt

SEQ ID NO: 6871 - DNA, 21 bp, Artificial Sequence
  Chr7q_2 Reverse Primer
tggtcatagtttgcaagtgga

SEQ ID NO: 6872 - DNA, 21 bp, Artificial Sequence
  Chr7q_2 Reverse Primer
tttcatcccctttatcaagca

SEQ ID NO: 6873 - DNA, 20 bp, Artificial Sequence
  Chr7q_2 Reverse Primer
tttgctagtttttgacgggc

SEQ ID NO: 6874 - DNA, 23 bp, Artificial Sequence
  Chr7q_2 Reverse Primer
tccctacctagcatttcagttca

SEQ ID NO: 6875 - DNA, 20 bp, Artificial Sequence
  Chr7q_2 Reverse Primer
ccacggcctagaaaagttga

SEQ ID NO: 6876 - DNA, 23 bp, Artificial Sequence
  Chr7q_2 Reverse Primer
tgagaggcagtattacaaagtgg

SEQ ID NO: 6877 - DNA, 25 bp, Artificial Sequence
  Chr7q_2 Reverse Primer
ttttcatgctattgcaaatactaca

SEQ ID NO: 6878 - DNA, 25 bp, Artificial Sequence
  Chr7q_2 Reverse Primer
aaaagaatattccaatcaagaagca

SEQ ID NO: 6879 - DNA, 20 bp, Artificial Sequence
  Chr7q_2 Reverse Primer
gtctcccgatgattcccata

SEQ ID NO: 6880 - DNA, 23 bp, Artificial Sequence
  Chr7q_2 Reverse Primer
ccattttatgttctcaaatccca

SEQ ID NO: 6881 - DNA, 20 bp, Artificial Sequence
  Chr7q_2 Reverse Primer
ggagtgtttttaccagggca

SEQ ID NO: 6882 - DNA, 25 bp, Artificial Sequence
  Chr7q_2 Reverse Primer
tttttgttgctgttttctttctttt

SEQ ID NO: 6883 - DNA, 20 bp, Artificial Sequence
  Chr7q_2 Reverse Primer
aggtggaggagaaggaggag

SEQ ID NO: 6884 - DNA, 20 bp, Artificial Sequence
  Chr7q_2 Reverse Primer
gcaatcatggctgagttcct

SEQ ID NO: 6885 - DNA, 20 bp, Artificial Sequence
  Chr7q_2 Reverse Primer
atcctaatgcctgagccttg

SEQ ID NO: 6886 - DNA, 21 bp, Artificial Sequence
  Chr7q_2 Reverse Primer
tttaatggggtgtgaaatcaa

SEQ ID NO: 6887 - DNA, 20 bp, Artificial Sequence
  Chr7q_2 Reverse Primer
tcctcattccttttccaacc

SEQ ID NO: 6888 - DNA, 20 bp, Artificial Sequence
  Chr7q_2 Reverse Primer
ggcaaaggctgatttcacat

SEQ ID NO: 6889 - DNA, 20 bp, Artificial Sequence
  Chr7q_2 Reverse Primer
tgctgtctttgaggcaagtg

SEQ ID NO: 6890 - DNA, 21 bp, Artificial Sequence
  Chr7q_2 Reverse Primer
ttgaaatttttcccactgcat

SEQ ID NO: 6891 - DNA, 22 bp, Artificial Sequence
  Chr7q_2 Reverse Primer
caaccctttaaacggagattca

SEQ ID NO: 6892 - DNA, 21 bp, Artificial Sequence
  Chr7q_2 Reverse Primer
gaatgatgagaaaaggtgcca

SEQ ID NO: 6893 - DNA, 20 bp, Artificial Sequence
  Chr7q_2 Reverse Primer
tatttcttcgccaagatgcc

SEQ ID NO: 6894 - DNA, 27 bp, Artificial Sequence
  Chr7q_2 Reverse Primer
caaagataactaagcaaacaacaacaa

SEQ ID NO: 6895 - DNA, 20 bp, Artificial Sequence
  Chr7q_2 Reverse Primer
gcacacagccccaaaataag

SEQ ID NO: 6896 - DNA, 20 bp, Artificial Sequence
  Chr7q_2 Reverse Primer
agcaaaccaagaaagctgga

SEQ ID NO: 6897 - DNA, 24 bp, Artificial Sequence
  Chr7q_2 Reverse Primer
ggatcatttctaattcaaagacca

SEQ ID NO: 6898 - DNA, 22 bp, Artificial Sequence
  Chr7q_2 Reverse Primer
tgtgttgaaaacagtctgtgga

SEQ ID NO: 6899 - DNA, 20 bp, Artificial Sequence
  Chr7q_2 Reverse Primer
tcattgtttaagccttcccc

SEQ ID NO: 6900 - DNA, 20 bp, Artificial Sequence
  Chr7q_2 Reverse Primer
ggcctctcatggtcaagtgt

SEQ ID NO: 6901 - DNA, 20 bp, Artificial Sequence
  Chr7q_2 Reverse Primer
ttaagccaaaatgacacccc

SEQ ID NO: 6902 - DNA, 20 bp, Artificial Sequence
  Chr7q_2 Reverse Primer
tggctgactgtagcaccaag

SEQ ID NO: 6903 - DNA, 22 bp, Artificial Sequence
  Chr7q_2 Reverse Primer
gaaggaaaagggaagaacacaa

SEQ ID NO: 6904 - DNA, 20 bp, Artificial Sequence
  Chr7q_2 Reverse Primer
gtggactcacaagccacaaa

SEQ ID NO: 6905 - DNA, 20 bp, Artificial Sequence
  Chr7q_2 Reverse Primer
ccttgcaaatttggcttttt

SEQ ID NO: 6906 - DNA, 23 bp, Artificial Sequence
  Chr7q_2 Reverse Primer
gagctgtcttagcttgtagggaa

SEQ ID NO: 6907 - DNA, 22 bp, Artificial Sequence
  Chr7q_2 Reverse Primer
gcttgtgttttctcttttgcct

SEQ ID NO: 6908 - DNA, 20 bp, Artificial Sequence
  Chr7q_2 Reverse Primer
aagcctgccattaaaaaccc

SEQ ID NO: 6909 - DNA, 20 bp, Artificial Sequence
  Chr7q_2 Reverse Primer
cctccccagttggatctctc

SEQ ID NO: 6910 - DNA, 20 bp, Artificial Sequence
  Chr7q_2 Reverse Primer
tggaatcccacctctacctg

SEQ ID NO: 6911 - DNA, 20 bp, Artificial Sequence
  Chr7q_2 Reverse Primer
tccctgtgaattgggaaaaa

SEQ ID NO: 6912 - DNA, 25 bp, Artificial Sequence
  Chr7q_2 Reverse Primer
ttcctagcactgaatgaggtataaa

SEQ ID NO: 6913 - DNA, 20 bp, Artificial Sequence
  Chr7q_2 Reverse Primer
gccaaggaagggtatcacac

SEQ ID NO: 6914 - DNA, 20 bp, Artificial Sequence
  Chr7q_2 Reverse Primer
acacacacacacacacccct

SEQ ID NO: 6915 - DNA, 23 bp, Artificial Sequence
  Chr7q_2 Reverse Primer
gactcagtggatagcatgaaaaa

SEQ ID NO: 6916 - DNA, 20 bp, Artificial Sequence
  Chr7q_2 Reverse Primer
tcagccttgcttatcattgc

SEQ ID NO: 6917 - DNA, 22 bp, Artificial Sequence
  Chr7q_2 Reverse Primer
aactgtgatgtctgactctgcc

SEQ ID NO: 6918 - DNA, 20 bp, Artificial Sequence
  Chr7q_2 Reverse Primer
agcagcaaccaagaggtttt

SEQ ID NO: 6919 - DNA, 20 bp, Artificial Sequence
  Chr7q_2 Reverse Primer
catccagactgggaaatgct

SEQ ID NO: 6920 - DNA, 20 bp, Artificial Sequence
  Chr7q_2 Reverse Primer
agcatcaatgtgggtgtcag

SEQ ID NO: 6921 - DNA, 20 bp, Artificial Sequence
  Chr7q_2 Reverse Primer
tgcacacgactgaaactcct

SEQ ID NO: 6922 - DNA, 20 bp, Artificial Sequence
  Chr7q_2 Reverse Primer
gcttcaggcatgcagtcata

SEQ ID NO: 6923 - DNA, 20 bp, Artificial Sequence
  Chr7q_2 Reverse Primer
cttgcaaattcccagatggt

SEQ ID NO: 6924 - DNA, 25 bp, Artificial Sequence
  Chr7q_2 Reverse Primer
atgatatgtaaaagttgtgcttgaa

SEQ ID NO: 6925 - DNA, 20 bp, Artificial Sequence
  Chr7q_2 Reverse Primer
tgagcacaggttccattcaa

SEQ ID NO: 6926 - DNA, 21 bp, Artificial Sequence
  Chr7q_2 Reverse Primer
gaaaagggaagaaagaatggg

SEQ ID NO: 6927 - DNA, 20 bp, Artificial Sequence
  Chr7q_2 Reverse Primer
ttgtgtaacctcaaatggcg

SEQ ID NO: 6928 - DNA, 21 bp, Artificial Sequence
  Chr7q_2 Reverse Primer
gaagtaatgcctgttcatgcc

SEQ ID NO: 6929 - DNA, 20 bp, Artificial Sequence
  Chr7q_3 Forward Primer
tttggcttccttacctggaa

SEQ ID NO: 6930 - DNA, 21 bp, Artificial Sequence
  Chr7q_3 Forward Primer
ttgacctgcaaatatacggtg

SEQ ID NO: 6931 - DNA, 23 bp, Artificial Sequence
  Chr7q_3 Forward Primer
cctgatgatacatgagctgaaca

SEQ ID NO: 6932 - DNA, 20 bp, Artificial Sequence
  Chr7q_3 Forward Primer
gggggcctctattgttttgt

SEQ ID NO: 6933 - DNA, 23 bp, Artificial Sequence
  Chr7q_3 Forward Primer
tgattcaccttgttaattgttga

SEQ ID NO: 6934 - DNA, 26 bp, Artificial Sequence
  Chr7q_3 Forward Primer
tttttaacagataaagatatggagca

SEQ ID NO: 6935 - DNA, 20 bp, Artificial Sequence
  Chr7q_3 Forward Primer
aagcatctgacatttggctg

SEQ ID NO: 6936 - DNA, 20 bp, Artificial Sequence
  Chr7q_3 Forward Primer
agctcatgataacccctcca

SEQ ID NO: 6937 - DNA, 20 bp, Artificial Sequence
  Chr7q_3 Forward Primer
tacacggccctggtaatagc

SEQ ID NO: 6938 - DNA, 20 bp, Artificial Sequence
  Chr7q_3 Forward Primer
tgtgcttcctgagagtttgg

SEQ ID NO: 6939 - DNA, 22 bp, Artificial Sequence
  Chr7q_3 Forward Primer
tctcatgcagtgattgtttcct

SEQ ID NO: 6940 - DNA, 24 bp, Artificial Sequence
  Chr7q_3 Forward Primer
tgtttgatttgattgagacatctg

SEQ ID NO: 6941 - DNA, 20 bp, Artificial Sequence
  Chr7q_3 Forward Primer
ccacttgggctcagaaagag

SEQ ID NO: 6942 - DNA, 20 bp, Artificial Sequence
  Chr7q_3 Forward Primer
ccaaggtcccaagatccata

SEQ ID NO: 6943 - DNA, 20 bp, Artificial Sequence
  Chr7q_3 Forward Primer
gggagaatttcaccaccaga

SEQ ID NO: 6944 - DNA, 20 bp, Artificial Sequence
  Chr7q_3 Forward Primer
ttgcttcttttctggcattg

SEQ ID NO: 6945 - DNA, 23 bp, Artificial Sequence
  Chr7q_3 Forward Primer
ttgaatcattcgaattgttgttg

SEQ ID NO: 6946 - DNA, 20 bp, Artificial Sequence
  Chr7q_3 Forward Primer
gctgaatgtcaccgacaaga

SEQ ID NO: 6947 - DNA, 20 bp, Artificial Sequence
  Chr7q_3 Forward Primer
acatacggatgagaaggcca

SEQ ID NO: 6948 - DNA, 20 bp, Artificial Sequence
  Chr7q_3 Forward Primer
atccccctcaattttcttgg

SEQ ID NO: 6949 - DNA, 22 bp, Artificial Sequence
  Chr7q_3 Forward Primer
tggcctgtaaagaaagagaagg

SEQ ID NO: 6950 - DNA, 20 bp, Artificial Sequence
  Chr7q_3 Forward Primer
tgacccaccattatcggatt

SEQ ID NO: 6951 - DNA, 20 bp, Artificial Sequence
  Chr7q_3 Forward Primer
aatcccttggattgtcctcc

SEQ ID NO: 6952 - DNA, 20 bp, Artificial Sequence
  Chr7q_3 Forward Primer
gttcagttcccttccaccag

SEQ ID NO: 6953 - DNA, 20 bp, Artificial Sequence
  Chr7q_3 Forward Primer
aaggaaaatgaagccagggt

SEQ ID NO: 6954 - DNA, 20 bp, Artificial Sequence
  Chr7q_3 Forward Primer
tgttaaagggcttccacagg

SEQ ID NO: 6955 - DNA, 20 bp, Artificial Sequence
  Chr7q_3 Forward Primer
ggagcacagagcaaatgtga

SEQ ID NO: 6956 - DNA, 20 bp, Artificial Sequence
  Chr7q_3 Forward Primer
atgcatgacttttatggccc

SEQ ID NO: 6957 - DNA, 20 bp, Artificial Sequence
  Chr7q_3 Forward Primer
aatgcagacgtaggagccac

SEQ ID NO: 6958 - DNA, 22 bp, Artificial Sequence
  Chr7q_3 Forward Primer
gactgagggtacttagctgtgc

SEQ ID NO: 6959 - DNA, 20 bp, Artificial Sequence
  Chr7q_3 Forward Primer
gcaaccttttccgaaccata

SEQ ID NO: 6960 - DNA, 20 bp, Artificial Sequence
  Chr7q_3 Forward Primer
tcagaaaagcactggcttcc

SEQ ID NO: 6961 - DNA, 20 bp, Artificial Sequence
  Chr7q_3 Forward Primer
gcctcaaaagctcacacaaa

SEQ ID NO: 6962 - DNA, 20 bp, Artificial Sequence
  Chr7q_3 Forward Primer
cctgctatgagccaggaact

SEQ ID NO: 6963 - DNA, 21 bp, Artificial Sequence
  Chr7q_3 Forward Primer
ttccaaattgcaagacaaaaa

SEQ ID NO: 6964 - DNA, 19 bp, Artificial Sequence
  Chr7q_3 Forward Primer
cttttccacaaaatgcccc

SEQ ID NO: 6965 - DNA, 20 bp, Artificial Sequence
  Chr7q_3 Forward Primer
cgatagcaaagagtgcctcc

SEQ ID NO: 6966 - DNA, 21 bp, Artificial Sequence
  Chr7q_3 Forward Primer
gcaattgaaaatccaccatga

SEQ ID NO: 6967 - DNA, 20 bp, Artificial Sequence
  Chr7q_3 Forward Primer
ctgggggatcacagagaatg

SEQ ID NO: 6968 - DNA, 21 bp, Artificial Sequence
  Chr7q_3 Forward Primer
tgcaatttctccctctcattg

SEQ ID NO: 6969 - DNA, 20 bp, Artificial Sequence
  Chr7q_3 Forward Primer
ggctagggctgcaaaaataa

SEQ ID NO: 6970 - DNA, 20 bp, Artificial Sequence
  Chr7q_3 Forward Primer
aggcaaaatgaagagcctga

SEQ ID NO: 6971 - DNA, 22 bp, Artificial Sequence
  Chr7q_3 Forward Primer
acatttccctgaagcttctaaa

SEQ ID NO: 6972 - DNA, 20 bp, Artificial Sequence
  Chr7q_3 Forward Primer
tcttccatctccaccctcag

SEQ ID NO: 6973 - DNA, 20 bp, Artificial Sequence
  Chr7q_3 Forward Primer
acatatctgcagcggtcagg

SEQ ID NO: 6974 - DNA, 20 bp, Artificial Sequence
  Chr7q_3 Forward Primer
ttgggtataggcaaaggctg

SEQ ID NO: 6975 - DNA, 21 bp, Artificial Sequence
  Chr7q_3 Forward Primer
ggtgccctaatcctaccttga

SEQ ID NO: 6976 - DNA, 20 bp, Artificial Sequence
  Chr7q_3 Forward Primer
tttccttcacttttggggag

SEQ ID NO: 6977 - DNA, 23 bp, Artificial Sequence
  Chr7q_3 Forward Primer
tcagccatcaccattttattttt

SEQ ID NO: 6978 - DNA, 20 bp, Artificial Sequence
  Chr7q_3 Forward Primer
tgagacacttcctgccttca

SEQ ID NO: 6979 - DNA, 23 bp, Artificial Sequence
  Chr7q_3 Forward Primer
tcctcagtacttgttgcagtgaa

SEQ ID NO: 6980 - DNA, 22 bp, Artificial Sequence
  Chr7q_3 Forward Primer
ccagaggaatttaaggatgcaa

SEQ ID NO: 6981 - DNA, 20 bp, Artificial Sequence
  Chr7q_3 Forward Primer
gtgccctgagtttcacacct

SEQ ID NO: 6982 - DNA, 20 bp, Artificial Sequence
  Chr7q_3 Forward Primer
cattaggaaagcaaggcaca

SEQ ID NO: 6983 - DNA, 20 bp, Artificial Sequence
  Chr7q_3 Forward Primer
tctcaaagcaggggaagcta

SEQ ID NO: 6984 - DNA, 20 bp, Artificial Sequence
  Chr7q_3 Forward Primer
tccattaccacatcttggca

SEQ ID NO: 6985 - DNA, 20 bp, Artificial Sequence
  Chr7q_3 Forward Primer
gaagctcctacacagcctgg

SEQ ID NO: 6986 - DNA, 20 bp, Artificial Sequence
  Chr7q_3 Forward Primer
tgggcaattttcacatcact

SEQ ID NO: 6987 - DNA, 20 bp, Artificial Sequence
  Chr7q_3 Forward Primer
ccacccctctgtctgtcttt

SEQ ID NO: 6988 - DNA, 23 bp, Artificial Sequence
  Chr7q_3 Forward Primer
tcctagaaaagatgggtcttgaa

SEQ ID NO: 6989 - DNA, 21 bp, Artificial Sequence
  Chr7q_3 Forward Primer
tcaccatgtgtgttcctgttg

SEQ ID NO: 6990 - DNA, 20 bp, Artificial Sequence
  Chr7q_3 Forward Primer
gtggcttgttattggtggct

SEQ ID NO: 6991 - DNA, 20 bp, Artificial Sequence
  Chr7q_3 Forward Primer
ttcagcctgagggctaaaag

SEQ ID NO: 6992 - DNA, 20 bp, Artificial Sequence
  Chr7q_3 Forward Primer
tgcctagtgtgtttgggtga

SEQ ID NO: 6993 - DNA, 20 bp, Artificial Sequence
  Chr7q_3 Forward Primer
ctgtgtctggcagagtccct

SEQ ID NO: 6994 - DNA, 20 bp, Artificial Sequence
  Chr7q_3 Forward Primer
tatgcttctttgggctccag

SEQ ID NO: 6995 - DNA, 20 bp, Artificial Sequence
  Chr7q_3 Forward Primer
gggaaatggagagccaaaat

SEQ ID NO: 6996 - DNA, 21 bp, Artificial Sequence
  Chr7q_3 Forward Primer
tctggatttgaatcccatctc

SEQ ID NO: 6997 - DNA, 20 bp, Artificial Sequence
  Chr7q_3 Forward Primer
ctggagccattagaagccaa

SEQ ID NO: 6998 - DNA, 20 bp, Artificial Sequence
  Chr7q_3 Forward Primer
cctctggtttctggttgagc

SEQ ID NO: 6999 - DNA, 20 bp, Artificial Sequence
  Chr7q_3 Forward Primer
tccagcgtattgtctccaca

SEQ ID NO: 7000 - DNA, 20 bp, Artificial Sequence
  Chr7q_3 Forward Primer
acttggggactttttgggat

SEQ ID NO: 7001 - DNA, 21 bp, Artificial Sequence
  Chr7q_3 Forward Primer
catgtgacaatgcaaaggaaa

SEQ ID NO: 7002 - DNA, 20 bp, Artificial Sequence
  Chr7q_3 Forward Primer
caaggtgctcctcctctgtc

SEQ ID NO: 7003 - DNA, 20 bp, Artificial Sequence
  Chr7q_3 Forward Primer
ttgttgcaattgtgcatgtg

SEQ ID NO: 7004 - DNA, 22 bp, Artificial Sequence
  Chr7q_3 Forward Primer
cagctgcttaagtccaacatga

SEQ ID NO: 7005 - DNA, 20 bp, Artificial Sequence
  Chr7q_3 Forward Primer
ggctggtctcctctttcaga

SEQ ID NO: 7006 - DNA, 20 bp, Artificial Sequence
  Chr7q_3 Forward Primer
gtgaggtcacagagcgtgaa

SEQ ID NO: 7007 - DNA, 20 bp, Artificial Sequence
  Chr7q_3 Forward Primer
tgctgctgcttcttggtaga

SEQ ID NO: 7008 - DNA, 20 bp, Artificial Sequence
  Chr7q_3 Forward Primer
tgaaaaggaaattctgggga

SEQ ID NO: 7009 - DNA, 20 bp, Artificial Sequence
  Chr7q_3 Forward Primer
cacacacgcttctgtggact

SEQ ID NO: 7010 - DNA, 20 bp, Artificial Sequence
  Chr7q_3 Forward Primer
ccaagccaccctgaataaaa

SEQ ID NO: 7011 - DNA, 22 bp, Artificial Sequence
  Chr7q_3 Forward Primer
tggaacattatcctgttgttca

SEQ ID NO: 7012 - DNA, 22 bp, Artificial Sequence
  Chr7q_3 Forward Primer
tgaagtgagtcgaaggtattgc

SEQ ID NO: 7013 - DNA, 21 bp, Artificial Sequence
  Chr7q_3 Forward Primer
aatgaacatgagagaagccga

SEQ ID NO: 7014 - DNA, 21 bp, Artificial Sequence
  Chr7q_3 Forward Primer
tgagacggcatttgatattgg

SEQ ID NO: 7015 - DNA, 21 bp, Artificial Sequence
  Chr7q_3 Forward Primer
tgcattaaaactcctgggaaa

SEQ ID NO: 7016 - DNA, 20 bp, Artificial Sequence
  Chr7q_3 Forward Primer
ttccttggagcaacaggaag

SEQ ID NO: 7017 - DNA, 21 bp, Artificial Sequence
  Chr7q_3 Forward Primer
tctatcagctttcaggcaaga

SEQ ID NO: 7018 - DNA, 21 bp, Artificial Sequence
  Chr7q_3 Forward Primer
ggtgtaccagaaatgacctgc

SEQ ID NO: 7019 - DNA, 20 bp, Artificial Sequence
  Chr7q_3 Forward Primer
tattggcagttccaaagcct

SEQ ID NO: 7020 - DNA, 19 bp, Artificial Sequence
  Chr7q_3 Forward Primer
tttgctcaggttgcacaca

SEQ ID NO: 7021 - DNA, 26 bp, Artificial Sequence
  Chr7q_3 Forward Primer
ttgggtaaggtttaagatatgattga

SEQ ID NO: 7022 - DNA, 20 bp, Artificial Sequence
  Chr7q_3 Forward Primer
tgagagacggtagggcaaag

SEQ ID NO: 7023 - DNA, 27 bp, Artificial Sequence
  Chr7q_3 Forward Primer
aaagaattaagatctatgcctttgaca

SEQ ID NO: 7024 - DNA, 20 bp, Artificial Sequence
  Chr7q_3 Forward Primer
tggaaggagctcattgtctg

SEQ ID NO: 7025 - DNA, 20 bp, Artificial Sequence
  Chr7q_3 Reverse Primer
ggtgcttgtgaccaaaatga

SEQ ID NO: 7026 - DNA, 20 bp, Artificial Sequence
  Chr7q_3 Reverse Primer
ctgctggagggaacataaaa

SEQ ID NO: 7027 - DNA, 25 bp, Artificial Sequence
  Chr7q_3 Reverse Primer
ttcatgagcttcagatacagaaaga

SEQ ID NO: 7028 - DNA, 20 bp, Artificial Sequence
  Chr7q_3 Reverse Primer
tgcaaatatgggcacttgat

SEQ ID NO: 7029 - DNA, 25 bp, Artificial Sequence
  Chr7q_3 Reverse Primer
tttttaaggaaatgcagattctagg

SEQ ID NO: 7030 - DNA, 22 bp, Artificial Sequence
  Chr7q_3 Reverse Primer
ggattcagtagacttggcctca

SEQ ID NO: 7031 - DNA, 20 bp, Artificial Sequence
  Chr7q_3 Reverse Primer
aggtaaaggtgagaggccaa

SEQ ID NO: 7032 - DNA, 19 bp, Artificial Sequence
  Chr7q_3 Reverse Primer
cggcacttgtggtgagaat

SEQ ID NO: 7033 - DNA, 20 bp, Artificial Sequence
  Chr7q_3 Reverse Primer
ttgactggcttgaccaaaga

SEQ ID NO: 7034 - DNA, 20 bp, Artificial Sequence
  Chr7q_3 Reverse Primer
ttcatacaccgtcccaggtc

SEQ ID NO: 7035 - DNA, 22 bp, Artificial Sequence
  Chr7q_3 Reverse Primer
ataatctggaaggacgtattgc

SEQ ID NO: 7036 - DNA, 21 bp, Artificial Sequence
  Chr7q_3 Reverse Primer
tcaggccaaacattaaatctg

SEQ ID NO: 7037 - DNA, 21 bp, Artificial Sequence
  Chr7q_3 Reverse Primer
gctagaagaaggcaaagagcc

SEQ ID NO: 7038 - DNA, 20 bp, Artificial Sequence
  Chr7q_3 Reverse Primer
tattttgcagccctctccag

SEQ ID NO: 7039 - DNA, 20 bp, Artificial Sequence
  Chr7q_3 Reverse Primer
gactgcagaaaatatggccc

SEQ ID NO: 7040 - DNA, 20 bp, Artificial Sequence
  Chr7q_3 Reverse Primer
ctttggatgggaggaaaatg

SEQ ID NO: 7041 - DNA, 24 bp, Artificial Sequence
  Chr7q_3 Reverse Primer
tggagtatactgatgcattgtgaa

SEQ ID NO: 7042 - DNA, 20 bp, Artificial Sequence
  Chr7q_3 Reverse Primer
gccttccagtcaaagacctg

SEQ ID NO: 7043 - DNA, 20 bp, Artificial Sequence
  Chr7q_3 Reverse Primer
gcaccctgtttccttaacca

SEQ ID NO: 7044 - DNA, 20 bp, Artificial Sequence
  Chr7q_3 Reverse Primer
atagggtctctgctccctcc

SEQ ID NO: 7045 - DNA, 21 bp, Artificial Sequence
  Chr7q_3 Reverse Primer
tggttgcaagcaacagagtaa

SEQ ID NO: 7046 - DNA, 20 bp, Artificial Sequence
  Chr7q_3 Reverse Primer
ggcattgtcgccaactttat

SEQ ID NO: 7047 - DNA, 20 bp, Artificial Sequence
  Chr7q_3 Reverse Primer
ggccatccctcactgactat

SEQ ID NO: 7048 - DNA, 20 bp, Artificial Sequence
  Chr7q_3 Reverse Primer
ggcagatataaccacacggg

SEQ ID NO: 7049 - DNA, 20 bp, Artificial Sequence
  Chr7q_3 Reverse Primer
agggtctgcacagagaagga

SEQ ID NO: 7050 - DNA, 20 bp, Artificial Sequence
  Chr7q_3 Reverse Primer
acgcttgcggtggtattatc

SEQ ID NO: 7051 - DNA, 20 bp, Artificial Sequence
  Chr7q_3 Reverse Primer
acccatctgtgtaagtccgc

SEQ ID NO: 7052 - DNA, 20 bp, Artificial Sequence
  Chr7q_3 Reverse Primer
ccaaggctcccatatgaaaa

SEQ ID NO: 7053 - DNA, 20 bp, Artificial Sequence
  Chr7q_3 Reverse Primer
tcccaacaacatacaaggca

SEQ ID NO: 7054 - DNA, 22 bp, Artificial Sequence
  Chr7q_3 Reverse Primer
tcacttcatggctatcttgctt

SEQ ID NO: 7055 - DNA, 20 bp, Artificial Sequence
  Chr7q_3 Reverse Primer
gcaccactgtaccactttgg

SEQ ID NO: 7056 - DNA, 21 bp, Artificial Sequence
  Chr7q_3 Reverse Primer
tggatccagaaagaatagggc

SEQ ID NO: 7057 - DNA, 22 bp, Artificial Sequence
  Chr7q_3 Reverse Primer
agagagatgaggtgtggttctg

SEQ ID NO: 7058 - DNA, 20 bp, Artificial Sequence
  Chr7q_3 Reverse Primer
tccttaataccccatgctgc

SEQ ID NO: 7059 - DNA, 20 bp, Artificial Sequence
  Chr7q_3 Reverse Primer
ctcattgaagccaaagtgga

SEQ ID NO: 7060 - DNA, 20 bp, Artificial Sequence
  Chr7q_3 Reverse Primer
attgccacacaagatttcct

SEQ ID NO: 7061 - DNA, 20 bp, Artificial Sequence
  Chr7q_3 Reverse Primer
tgcttttcgttgtttccaca

SEQ ID NO: 7062 - DNA, 20 bp, Artificial Sequence
  Chr7q_3 Reverse Primer
ccttcctgaggtattggcat

SEQ ID NO: 7063 - DNA, 20 bp, Artificial Sequence
  Chr7q_3 Reverse Primer
gccttgccaaagttttcaga

SEQ ID NO: 7064 - DNA, 21 bp, Artificial Sequence
  Chr7q_3 Reverse Primer
gcattttaatcaaatcctggc

SEQ ID NO: 7065 - DNA, 20 bp, Artificial Sequence
  Chr7q_3 Reverse Primer
agccccactagtctgatcca

SEQ ID NO: 7066 - DNA, 20 bp, Artificial Sequence
  Chr7q_3 Reverse Primer
ttggcagctttgattcagtg

SEQ ID NO: 7067 - DNA, 20 bp, Artificial Sequence
  Chr7q_3 Reverse Primer
aacctggccaatttaaccaa

SEQ ID NO: 7068 - DNA, 23 bp, Artificial Sequence
  Chr7q_3 Reverse Primer
ttccctggaatttatttgtcaga

SEQ ID NO: 7069 - DNA, 20 bp, Artificial Sequence
  Chr7q_3 Reverse Primer
tctgaagaccatagcgcaaa

SEQ ID NO: 7070 - DNA, 20 bp, Artificial Sequence
  Chr7q_3 Reverse Primer
ggaggtttttccattgtccc

SEQ ID NO: 7071 - DNA, 23 bp, Artificial Sequence
  Chr7q_3 Reverse Primer
cactgaccacataaccatgtgaa

SEQ ID NO: 7072 - DNA, 21 bp, Artificial Sequence
  Chr7q_3 Reverse Primer
agaccctggagagagaccaag

SEQ ID NO: 7073 - DNA, 21 bp, Artificial Sequence
  Chr7q_3 Reverse Primer
gggggaaaaagattactcctg

SEQ ID NO: 7074 - DNA, 22 bp, Artificial Sequence
  Chr7q_3 Reverse Primer
caagggttttgaaaagttctgg

SEQ ID NO: 7075 - DNA, 20 bp, Artificial Sequence
  Chr7q_3 Reverse Primer
gacagttttccaggtgagcc

SEQ ID NO: 7076 - DNA, 20 bp, Artificial Sequence
  Chr7q_3 Reverse Primer
tcctttgccaatttcaggat

SEQ ID NO: 7077 - DNA, 24 bp, Artificial Sequence
  Chr7q_3 Reverse Primer
tctcataaagctgtctgtgaaaaa

SEQ ID NO: 7078 - DNA, 20 bp, Artificial Sequence
  Chr7q_3 Reverse Primer
agaggtttgcacactccgtt

SEQ ID NO: 7079 - DNA, 20 bp, Artificial Sequence
  Chr7q_3 Reverse Primer
tggatgctttctcatacgga

SEQ ID NO: 7080 - DNA, 20 bp, Artificial Sequence
  Chr7q_3 Reverse Primer
gctggtgcaagggacagtat

SEQ ID NO: 7081 - DNA, 20 bp, Artificial Sequence
  Chr7q_3 Reverse Primer
ttctgaaaggcacaatgcag

SEQ ID NO: 7082 - DNA, 20 bp, Artificial Sequence
  Chr7q_3 Reverse Primer
gaatccctgtggatttgtgg

SEQ ID NO: 7083 - DNA, 23 bp, Artificial Sequence
  Chr7q_3 Reverse Primer
ggggaaagagaagttattgaaca

SEQ ID NO: 7084 - DNA, 26 bp, Artificial Sequence
  Chr7q_3 Reverse Primer
atccatattctgtcatagaagtccaa

SEQ ID NO: 7085 - DNA, 22 bp, Artificial Sequence
  Chr7q_3 Reverse Primer
acacagtcgttttccaatgaga

SEQ ID NO: 7086 - DNA, 20 bp, Artificial Sequence
  Chr7q_3 Reverse Primer
atccctcacaatgagccaag

SEQ ID NO: 7087 - DNA, 23 bp, Artificial Sequence
  Chr7q_3 Reverse Primer
tgtttgaaagaaaggaaagaagc

SEQ ID NO: 7088 - DNA, 20 bp, Artificial Sequence
  Chr7q_3 Reverse Primer
tcaaaacacatatgccctgc

SEQ ID NO: 7089 - DNA, 21 bp, Artificial Sequence
  Chr7q_3 Reverse Primer
aaaactcccaagggcctaata

SEQ ID NO: 7090 - DNA, 20 bp, Artificial Sequence
  Chr7q_3 Reverse Primer
tctccctgtctcccatctgt

SEQ ID NO: 7091 - DNA, 20 bp, Artificial Sequence
  Chr7q_3 Reverse Primer
ccacttggtgctgttgattg

SEQ ID NO: 7092 - DNA, 20 bp, Artificial Sequence
  Chr7q_3 Reverse Primer
acctgcagaataatgggacc

SEQ ID NO: 7093 - DNA, 20 bp, Artificial Sequence
  Chr7q_3 Reverse Primer
gggccaagggatattttcat

SEQ ID NO: 7094 - DNA, 20 bp, Artificial Sequence
  Chr7q_3 Reverse Primer
gaatggacaagtggagggaa

SEQ ID NO: 7095 - DNA, 20 bp, Artificial Sequence
  Chr7q_3 Reverse Primer
tctcctttgcaaacctgctt

SEQ ID NO: 7096 - DNA, 22 bp, Artificial Sequence
  Chr7q_3 Reverse Primer
gggcttagtaacaccaaactgg

SEQ ID NO: 7097 - DNA, 25 bp, Artificial Sequence
  Chr7q_3 Reverse Primer
tgatatcagtccctggtattacaaa

SEQ ID NO: 7098 - DNA, 20 bp, Artificial Sequence
  Chr7q_3 Reverse Primer
ctggctgcacttcagaatca

SEQ ID NO: 7099 - DNA, 20 bp, Artificial Sequence
  Chr7q_3 Reverse Primer
tcccctcttcattctgttgc

SEQ ID NO: 7100 - DNA, 20 bp, Artificial Sequence
  Chr7q_3 Reverse Primer
gggtaaccctgcacaagaac

SEQ ID NO: 7101 - DNA, 20 bp, Artificial Sequence
  Chr7q_3 Reverse Primer
gaagcacactgcagacccta

SEQ ID NO: 7102 - DNA, 20 bp, Artificial Sequence
  Chr7q_3 Reverse Primer
gtgtctgagctccaccatca

SEQ ID NO: 7103 - DNA, 21 bp, Artificial Sequence
  Chr7q_3 Reverse Primer
caccgcaattttgttatagcc

SEQ ID NO: 7104 - DNA, 23 bp, Artificial Sequence
  Chr7q_3 Reverse Primer
tgagttactataatcgcttcccg

SEQ ID NO: 7105 - DNA, 20 bp, Artificial Sequence
  Chr7q_3 Reverse Primer
tggcaggtcacagattcaac

SEQ ID NO: 7106 - DNA, 20 bp, Artificial Sequence
  Chr7q_3 Reverse Primer
gcccaatgatgtgtcagaga

SEQ ID NO: 7107 - DNA, 20 bp, Artificial Sequence
  Chr7q_3 Reverse Primer
tctcctttggaggctagcag

SEQ ID NO: 7108 - DNA, 20 bp, Artificial Sequence
  Chr7q_3 Reverse Primer
gcatcccacacctcttcttc

SEQ ID NO: 7109 - DNA, 23 bp, Artificial Sequence
  Chr7q_3 Reverse Primer
ttgtctcatcctcctactactgg

SEQ ID NO: 7110 - DNA, 20 bp, Artificial Sequence
  Chr7q_3 Reverse Primer
tcatattttcccatgcacca

SEQ ID NO: 7111 - DNA, 20 bp, Artificial Sequence
  Chr7q_3 Reverse Primer
accactggcaggacagacac

SEQ ID NO: 7112 - DNA, 20 bp, Artificial Sequence
  Chr7q_3 Reverse Primer
cattggccacattgacaaaa

SEQ ID NO: 7113 - DNA, 21 bp, Artificial Sequence
  Chr7q_3 Reverse Primer
ccattttcagcaaatttccaa

SEQ ID NO: 7114 - DNA, 19 bp, Artificial Sequence
  Chr7q_3 Reverse Primer
gctccttgtgctgttggaa

SEQ ID NO: 7115 - DNA, 20 bp, Artificial Sequence
  Chr7q_3 Reverse Primer
cccagctccacttctgagag

SEQ ID NO: 7116 - DNA, 25 bp, Artificial Sequence
  Chr7q_3 Reverse Primer
cagaaacattaaaagtgattgtgga

SEQ ID NO: 7117 - DNA, 22 bp, Artificial Sequence
  Chr7q_3 Reverse Primer
gcaacttaaatctggggaagaa

SEQ ID NO: 7118 - DNA, 20 bp, Artificial Sequence
  Chr7q_3 Reverse Primer
tgtgagagccaaatcagcaa

SEQ ID NO: 7119 - DNA, 23 bp, Artificial Sequence
  Chr7q_3 Reverse Primer
ttttcaattgcacttcattatgg

SEQ ID NO: 7120 - DNA, 22 bp, Artificial Sequence
  Chr7q_3 Reverse Primer
aaggaaaattaaaccaagggga

SEQ ID NO: 7121 - DNA, 20 bp, Artificial Sequence
  Chr7q_4 Forward Primer
ggcaagcaataaagaggcag

SEQ ID NO: 7122 - DNA, 20 bp, Artificial Sequence
  Chr7q_4 Forward Primer
atcctctcagtccccttgct

SEQ ID NO: 7123 - DNA, 20 bp, Artificial Sequence
  Chr7q_4 Forward Primer
tccccgcatcttctcactat

SEQ ID NO: 7124 - DNA, 20 bp, Artificial Sequence
  Chr7q_4 Forward Primer
tcaaaacccaccacagttca

SEQ ID NO: 7125 - DNA, 21 bp, Artificial Sequence
  Chr7q_4 Forward Primer
ccacctaattcctagccatcc

SEQ ID NO: 7126 - DNA, 20 bp, Artificial Sequence
  Chr7q_4 Forward Primer
catgggctcactctcattca

SEQ ID NO: 7127 - DNA, 20 bp, Artificial Sequence
  Chr7q_4 Forward Primer
tggagcagagcgtgatgtag

SEQ ID NO: 7128 - DNA, 20 bp, Artificial Sequence
  Chr7q_4 Forward Primer
ttcatgtctccctattgcca

SEQ ID NO: 7129 - DNA, 20 bp, Artificial Sequence
  Chr7q_4 Forward Primer
aaagcattccttggccttct

SEQ ID NO: 7130 - DNA, 20 bp, Artificial Sequence
  Chr7q_4 Forward Primer
atttgtgaccagccaacctc

SEQ ID NO: 7131 - DNA, 20 bp, Artificial Sequence
  Chr7q_4 Forward Primer
agaagtgactctggcttggg

SEQ ID NO: 7132 - DNA, 22 bp, Artificial Sequence
  Chr7q_4 Forward Primer
ttgagtaaaagactcaagggca

SEQ ID NO: 7133 - DNA, 20 bp, Artificial Sequence
  Chr7q_4 Forward Primer
ttggcaactctgctgacagt

SEQ ID NO: 7134 - DNA, 20 bp, Artificial Sequence
  Chr7q_4 Forward Primer
ctggattggttgctttgctt

SEQ ID NO: 7135 - DNA, 20 bp, Artificial Sequence
  Chr7q_4 Forward Primer
ttaagccctgatccctttcc

SEQ ID NO: 7136 - DNA, 21 bp, Artificial Sequence
  Chr7q_4 Forward Primer
aaagtcagtaaaggcctggct

SEQ ID NO: 7137 - DNA, 20 bp, Artificial Sequence
  Chr7q_4 Forward Primer
ggcagacagtcccttaccaa

SEQ ID NO: 7138 - DNA, 27 bp, Artificial Sequence
  Chr7q_4 Forward Primer
taatggttaacatacaaataaggaaca

SEQ ID NO: 7139 - DNA, 20 bp, Artificial Sequence
  Chr7q_4 Forward Primer
gagttgaaggccacggaata

SEQ ID NO: 7140 - DNA, 20 bp, Artificial Sequence
  Chr7q_4 Forward Primer
ccacacactgccctaaggtt

SEQ ID NO: 7141 - DNA, 20 bp, Artificial Sequence
  Chr7q_4 Forward Primer
tcagtgatcacctctgtgcc

SEQ ID NO: 7142 - DNA, 20 bp, Artificial Sequence
  Chr7q_4 Forward Primer
cactggttttctgggtccaa

SEQ ID NO: 7143 - DNA, 20 bp, Artificial Sequence
  Chr7q_4 Forward Primer
tgtacccaccttcattggct

SEQ ID NO: 7144 - DNA, 20 bp, Artificial Sequence
  Chr7q_4 Forward Primer
caagacctgttgaggctggt

SEQ ID NO: 7145 - DNA, 20 bp, Artificial Sequence
  Chr7q_4 Forward Primer
cagcactactccgtggaaca

SEQ ID NO: 7146 - DNA, 20 bp, Artificial Sequence
  Chr7q_4 Forward Primer
cctcccctctacccagaatc

SEQ ID NO: 7147 - DNA, 20 bp, Artificial Sequence
  Chr7q_4 Forward Primer
attggtcacaatgagggtgg

SEQ ID NO: 7148 - DNA, 23 bp, Artificial Sequence
  Chr7q_4 Forward Primer
gcaagtgtatcctttattctgcg

SEQ ID NO: 7149 - DNA, 20 bp, Artificial Sequence
  Chr7q_4 Forward Primer
ggagacggcatactcaccat

SEQ ID NO: 7150 - DNA, 20 bp, Artificial Sequence
  Chr7q_4 Forward Primer
tgttttgatctgttggcctg

SEQ ID NO: 7151 - DNA, 20 bp, Artificial Sequence
  Chr7q_4 Forward Primer
actactgcatgtggcaccaa

SEQ ID NO: 7152 - DNA, 20 bp, Artificial Sequence
  Chr7q_4 Forward Primer
gccttctaaggccacattca

SEQ ID NO: 7153 - DNA, 20 bp, Artificial Sequence
  Chr7q_4 Forward Primer
cagacaagcacatggggtaa

SEQ ID NO: 7154 - DNA, 20 bp, Artificial Sequence
  Chr7q_4 Forward Primer
gatgggagggatctaaaggc

SEQ ID NO: 7155 - DNA, 20 bp, Artificial Sequence
  Chr7q_4 Forward Primer
cctgggcctcttttctctct

SEQ ID NO: 7156 - DNA, 20 bp, Artificial Sequence
  Chr7q_4 Forward Primer
aagctgctgctttctggtct

SEQ ID NO: 7157 - DNA, 21 bp, Artificial Sequence
  Chr7q_4 Forward Primer
cagcatgctactgagatgagc

SEQ ID NO: 7158 - DNA, 26 bp, Artificial Sequence
  Chr7q_4 Forward Primer
tgcattaaagtgggataatgataaaa

SEQ ID NO: 7159 - DNA, 20 bp, Artificial Sequence
  Chr7q_4 Forward Primer
gttaagttttcggcccatca

SEQ ID NO: 7160 - DNA, 25 bp, Artificial Sequence
  Chr7q_4 Forward Primer
ctgcatttcaactaagctttctact

SEQ ID NO: 7161 - DNA, 20 bp, Artificial Sequence
  Chr7q_4 Forward Primer
tgaaatcgctctgcttcctt

SEQ ID NO: 7162 - DNA, 20 bp, Artificial Sequence
  Chr7q_4 Forward Primer
tgtgataggaggagggggta

SEQ ID NO: 7163 - DNA, 21 bp, Artificial Sequence
  Chr7q_4 Forward Primer
aagcagtttgtggtaaagcag

SEQ ID NO: 7164 - DNA, 24 bp, Artificial Sequence
  Chr7q_4 Forward Primer
aaatgaattcttggatgttcacaa

SEQ ID NO: 7165 - DNA, 20 bp, Artificial Sequence
  Chr7q_4 Forward Primer
catctcctcacactggggac

SEQ ID NO: 7166 - DNA, 21 bp, Artificial Sequence
  Chr7q_4 Forward Primer
tttcctctattggctgtgagc

SEQ ID NO: 7167 - DNA, 24 bp, Artificial Sequence
  Chr7q_4 Forward Primer
ttttgaattgtcctatcatgttgc

SEQ ID NO: 7168 - DNA, 20 bp, Artificial Sequence
  Chr7q_4 Forward Primer
caccctccttggtgaatgtc

SEQ ID NO: 7169 - DNA, 20 bp, Artificial Sequence
  Chr7q_4 Forward Primer
tccagcacttgtgccattac

SEQ ID NO: 7170 - DNA, 20 bp, Artificial Sequence
  Chr7q_4 Forward Primer
agtggctttgtaccagtggg

SEQ ID NO: 7171 - DNA, 20 bp, Artificial Sequence
  Chr7q_4 Forward Primer
gaagcaagtctcagttggca

SEQ ID NO: 7172 - DNA, 20 bp, Artificial Sequence
  Chr7q_4 Forward Primer
ttcaacaaaaattcaggcca

SEQ ID NO: 7173 - DNA, 20 bp, Artificial Sequence
  Chr7q_4 Forward Primer
tgctaagtcccccacacttt

SEQ ID NO: 7174 - DNA, 20 bp, Artificial Sequence
  Chr7q_4 Forward Primer
tgcctcctctggctatcagt

SEQ ID NO: 7175 - DNA, 21 bp, Artificial Sequence
  Chr7q_4 Forward Primer
ttcactttcacccttttggaa

SEQ ID NO: 7176 - DNA, 20 bp, Artificial Sequence
  Chr7q_4 Forward Primer
aaagtagagatgcctggggg

SEQ ID NO: 7177 - DNA, 20 bp, Artificial Sequence
  Chr7q_4 Forward Primer
gtgaaccccactacagggtg

SEQ ID NO: 7178 - DNA, 20 bp, Artificial Sequence
  Chr7q_4 Forward Primer
acgttgatcttggggatgaa

SEQ ID NO: 7179 - DNA, 20 bp, Artificial Sequence
  Chr7q_4 Forward Primer
cattttcctagccaagccaa

SEQ ID NO: 7180 - DNA, 21 bp, Artificial Sequence
  Chr7q_4 Forward Primer
acctttggttctgctgatttt

SEQ ID NO: 7181 - DNA, 21 bp, Artificial Sequence
  Chr7q_4 Forward Primer
tttcaacttcccattgtagca

SEQ ID NO: 7182 - DNA, 20 bp, Artificial Sequence
  Chr7q_4 Forward Primer
gtcacgggtggtaatggaat

SEQ ID NO: 7183 - DNA, 20 bp, Artificial Sequence
  Chr7q_4 Forward Primer
accaattgtcttctctgggc

SEQ ID NO: 7184 - DNA, 20 bp, Artificial Sequence
  Chr7q_4 Forward Primer
ataccatggaactgccttgc

SEQ ID NO: 7185 - DNA, 20 bp, Artificial Sequence
  Chr7q_4 Forward Primer
attcagggagcaattcatgc

SEQ ID NO: 7186 - DNA, 20 bp, Artificial Sequence
  Chr7q_4 Forward Primer
ccaagcaggaacgtcaagat

SEQ ID NO: 7187 - DNA, 19 bp, Artificial Sequence
  Chr7q_4 Forward Primer
gcctggcacattccttttt

SEQ ID NO: 7188 - DNA, 20 bp, Artificial Sequence
  Chr7q_4 Forward Primer
cacttcgtcatggcattttg

SEQ ID NO: 7189 - DNA, 21 bp, Artificial Sequence
  Chr7q_4 Forward Primer
gacaaacacttcctccacacc

SEQ ID NO: 7190 - DNA, 23 bp, Artificial Sequence
  Chr7q_4 Forward Primer
tggaagctttatagtccaaatgc

SEQ ID NO: 7191 - DNA, 20 bp, Artificial Sequence
  Chr7q_4 Forward Primer
ggtggaaagactcagggaca

SEQ ID NO: 7192 - DNA, 22 bp, Artificial Sequence
  Chr7q_4 Forward Primer
gcatccttagtccttcctgaaa

SEQ ID NO: 7193 - DNA, 20 bp, Artificial Sequence
  Chr7q_4 Forward Primer
acgaggaagcagatggaaaa

SEQ ID NO: 7194 - DNA, 22 bp, Artificial Sequence
  Chr7q_4 Forward Primer
catgcagagaagtcaatgaaca

SEQ ID NO: 7195 - DNA, 20 bp, Artificial Sequence
  Chr7q_4 Forward Primer
tgactctttacggatgcacg

SEQ ID NO: 7196 - DNA, 20 bp, Artificial Sequence
  Chr7q_4 Forward Primer
tcttttggtttggggagaaa

SEQ ID NO: 7197 - DNA, 20 bp, Artificial Sequence
  Chr7q_4 Forward Primer
tccccttgattatggaatgc

SEQ ID NO: 7198 - DNA, 23 bp, Artificial Sequence
  Chr7q_4 Forward Primer
ttcttttctcatcctttttcagg

SEQ ID NO: 7199 - DNA, 20 bp, Artificial Sequence
  Chr7q_4 Forward Primer
taatgcttggctgctcttgc

SEQ ID NO: 7200 - DNA, 20 bp, Artificial Sequence
  Chr7q_4 Forward Primer
caggccctatgcatttcttt

SEQ ID NO: 7201 - DNA, 21 bp, Artificial Sequence
  Chr7q_4 Forward Primer
ccaaatggttctattggcaga

SEQ ID NO: 7202 - DNA, 20 bp, Artificial Sequence
  Chr7q_4 Forward Primer
ggaaacatggtttgggctaa

SEQ ID NO: 7203 - DNA, 20 bp, Artificial Sequence
  Chr7q_4 Forward Primer
tcacacgttcaacaagccat

SEQ ID NO: 7204 - DNA, 23 bp, Artificial Sequence
  Chr7q_4 Forward Primer
cacatgtgtgaaatggaaaagtt

SEQ ID NO: 7205 - DNA, 20 bp, Artificial Sequence
  Chr7q_4 Forward Primer
tggctttctaaagctgaggc

SEQ ID NO: 7206 - DNA, 20 bp, Artificial Sequence
  Chr7q_4 Forward Primer
ctgtcagcatggtggcttta

SEQ ID NO: 7207 - DNA, 20 bp, Artificial Sequence
  Chr7q_4 Forward Primer
ttttgctcccctcttctcct

SEQ ID NO: 7208 - DNA, 20 bp, Artificial Sequence
  Chr7q_4 Forward Primer
attttcccttgcctcttggt

SEQ ID NO: 7209 - DNA, 20 bp, Artificial Sequence
  Chr7q_4 Forward Primer
cacttgaggcagaaagaggg

SEQ ID NO: 7210 - DNA, 20 bp, Artificial Sequence
  Chr7q_4 Forward Primer
gaggggaagacagatgcaaa

SEQ ID NO: 7211 - DNA, 20 bp, Artificial Sequence
  Chr7q_4 Forward Primer
aaacttgcaacccaaagcac

SEQ ID NO: 7212 - DNA, 20 bp, Artificial Sequence
  Chr7q_4 Forward Primer
gttgctgaagggcttgctac

SEQ ID NO: 7213 - DNA, 20 bp, Artificial Sequence
  Chr7q_4 Forward Primer
ttttcactgagagccaccct

SEQ ID NO: 7214 - DNA, 20 bp, Artificial Sequence
  Chr7q_4 Forward Primer
gaacatcatccaaagcccac

SEQ ID NO: 7215 - DNA, 20 bp, Artificial Sequence
  Chr7q_4 Forward Primer
ggttccaggaaggacatgaa

SEQ ID NO: 7216 - DNA, 20 bp, Artificial Sequence
  Chr7q_4 Forward Primer
gcactgactcccaggaaatg

SEQ ID NO: 7217 - DNA, 20 bp, Artificial Sequence
  Chr7q_4 Reverse Primer
caggaagagatggccttcaa

SEQ ID NO: 7218 - DNA, 20 bp, Artificial Sequence
  Chr7q_4 Reverse Primer
ggctggaggtacaaatggaa

SEQ ID NO: 7219 - DNA, 20 bp, Artificial Sequence
  Chr7q_4 Reverse Primer
agaggagggtgcaaaggtgt

SEQ ID NO: 7220 - DNA, 20 bp, Artificial Sequence
  Chr7q_4 Reverse Primer
aatcaggggaacaatgtgga

SEQ ID NO: 7221 - DNA, 20 bp, Artificial Sequence
  Chr7q_4 Reverse Primer
tgcactggaggaggttacaa

SEQ ID NO: 7222 - DNA, 21 bp, Artificial Sequence
  Chr7q_4 Reverse Primer
aaatggagatccttttcacca

SEQ ID NO: 7223 - DNA, 20 bp, Artificial Sequence
  Chr7q_4 Reverse Primer
aagagacatgggaggcaatg

SEQ ID NO: 7224 - DNA, 20 bp, Artificial Sequence
  Chr7q_4 Reverse Primer
gggtaggagtgttccaagca

SEQ ID NO: 7225 - DNA, 20 bp, Artificial Sequence
  Chr7q_4 Reverse Primer
taggcctatgagggagctga

SEQ ID NO: 7226 - DNA, 20 bp, Artificial Sequence
  Chr7q_4 Reverse Primer
ggccagaattgaggatttca

SEQ ID NO: 7227 - DNA, 20 bp, Artificial Sequence
  Chr7q_4 Reverse Primer
cccacaagaattttgaccct

SEQ ID NO: 7228 - DNA, 20 bp, Artificial Sequence
  Chr7q_4 Reverse Primer
cattaaaggtgttgccatgc

SEQ ID NO: 7229 - DNA, 21 bp, Artificial Sequence
  Chr7q_4 Reverse Primer
ttgttttgtcatcttcccaca

SEQ ID NO: 7230 - DNA, 20 bp, Artificial Sequence
  Chr7q_4 Reverse Primer
tctgtgcatttccactcctg

SEQ ID NO: 7231 - DNA, 24 bp, Artificial Sequence
  Chr7q_4 Reverse Primer
tctgttttctgctagtgagactgc

SEQ ID NO: 7232 - DNA, 21 bp, Artificial Sequence
  Chr7q_4 Reverse Primer
tgttcaccacatgcttctacg

SEQ ID NO: 7233 - DNA, 20 bp, Artificial Sequence
  Chr7q_4 Reverse Primer
ggaagcatttcaaagcagga

SEQ ID NO: 7234 - DNA, 25 bp, Artificial Sequence
  Chr7q_4 Reverse Primer
cacagcagagcaagatatataagca

SEQ ID NO: 7235 - DNA, 20 bp, Artificial Sequence
  Chr7q_4 Reverse Primer
gtgtgcagccaagactgaga

SEQ ID NO: 7236 - DNA, 20 bp, Artificial Sequence
  Chr7q_4 Reverse Primer
ggtctggaagaatgcccata

SEQ ID NO: 7237 - DNA, 22 bp, Artificial Sequence
  Chr7q_4 Reverse Primer
tgagggaaaatggtgagttttt

SEQ ID NO: 7238 - DNA, 20 bp, Artificial Sequence
  Chr7q_4 Reverse Primer
tggcatgaagagacatggaa

SEQ ID NO: 7239 - DNA, 20 bp, Artificial Sequence
  Chr7q_4 Reverse Primer
gcagcctcctgagaaaggtt

SEQ ID NO: 7240 - DNA, 20 bp, Artificial Sequence
  Chr7q_4 Reverse Primer
agagatgaccaatggttggc

SEQ ID NO: 7241 - DNA, 23 bp, Artificial Sequence
  Chr7q_4 Reverse Primer
catactttaggaggaatgccaga

SEQ ID NO: 7242 - DNA, 20 bp, Artificial Sequence
  Chr7q_4 Reverse Primer
accatgcactcacacagacc

SEQ ID NO: 7243 - DNA, 21 bp, Artificial Sequence
  Chr7q_4 Reverse Primer
gagaatgccaggaataagcaa

SEQ ID NO: 7244 - DNA, 25 bp, Artificial Sequence
  Chr7q_4 Reverse Primer
tcaaaccacactgtactcttgaaaa

SEQ ID NO: 7245 - DNA, 20 bp, Artificial Sequence
  Chr7q_4 Reverse Primer
taggaaatggctgcttcacc

SEQ ID NO: 7246 - DNA, 20 bp, Artificial Sequence
  Chr7q_4 Reverse Primer
caaattttgcttcccagctt

SEQ ID NO: 7247 - DNA, 20 bp, Artificial Sequence
  Chr7q_4 Reverse Primer
gggcacgcagctagattaga

SEQ ID NO: 7248 - DNA, 20 bp, Artificial Sequence
  Chr7q_4 Reverse Primer
tttcagcaattccagcaatg

SEQ ID NO: 7249 - DNA, 20 bp, Artificial Sequence
  Chr7q_4 Reverse Primer
actcaggtccctcaggctct

SEQ ID NO: 7250 - DNA, 20 bp, Artificial Sequence
  Chr7q_4 Reverse Primer
ttaaatgtgcctcccaaagc

SEQ ID NO: 7251 - DNA, 20 bp, Artificial Sequence
  Chr7q_4 Reverse Primer
gctagttttcattggcaccc

SEQ ID NO: 7252 - DNA, 20 bp, Artificial Sequence
  Chr7q_4 Reverse Primer
gataaatgaatggggtgggg

SEQ ID NO: 7253 - DNA, 24 bp, Artificial Sequence
  Chr7q_4 Reverse Primer
cccaaataagtaattgtctcatgg

SEQ ID NO: 7254 - DNA, 21 bp, Artificial Sequence
  Chr7q_4 Reverse Primer
tgcaagtgaacaaagaaacca

SEQ ID NO: 7255 - DNA, 20 bp, Artificial Sequence
  Chr7q_4 Reverse Primer
tttatctccgccagcaattt

SEQ ID NO: 7256 - DNA, 23 bp, Artificial Sequence
  Chr7q_4 Reverse Primer
ggaaacatacctaaacaggcaaa

SEQ ID NO: 7257 - DNA, 20 bp, Artificial Sequence
  Chr7q_4 Reverse Primer
tgagtggtgggaaaccatct

SEQ ID NO: 7258 - DNA, 20 bp, Artificial Sequence
  Chr7q_4 Reverse Primer
ttttgttgtccctgcctgat

SEQ ID NO: 7259 - DNA, 20 bp, Artificial Sequence
  Chr7q_4 Reverse Primer
gggttccattttggaaacaa

SEQ ID NO: 7260 - DNA, 20 bp, Artificial Sequence
  Chr7q_4 Reverse Primer
ctggctactcaggtccaacc

SEQ ID NO: 7261 - DNA, 20 bp, Artificial Sequence
  Chr7q_4 Reverse Primer
gcataggtagaagctgccca

SEQ ID NO: 7262 - DNA, 21 bp, Artificial Sequence
  Chr7q_4 Reverse Primer
ttttgggctctctgtttctga

SEQ ID NO: 7263 - DNA, 22 bp, Artificial Sequence
  Chr7q_4 Reverse Primer
gaaaattgggaagattcacagg

SEQ ID NO: 7264 - DNA, 20 bp, Artificial Sequence
  Chr7q_4 Reverse Primer
cacatcaccttggtgtgctt

SEQ ID NO: 7265 - DNA, 20 bp, Artificial Sequence
  Chr7q_4 Reverse Primer
cacgtttcaaactgccttca

SEQ ID NO: 7266 - DNA, 20 bp, Artificial Sequence
  Chr7q_4 Reverse Primer
tgacaaagacctgccagtca

SEQ ID NO: 7267 - DNA, 21 bp, Artificial Sequence
  Chr7q_4 Reverse Primer
cctgaatggagtaagacaggc

SEQ ID NO: 7268 - DNA, 20 bp, Artificial Sequence
  Chr7q_4 Reverse Primer
aacatcacttggcaaaccag

SEQ ID NO: 7269 - DNA, 20 bp, Artificial Sequence
  Chr7q_4 Reverse Primer
aagctaccactggttgtggg

SEQ ID NO: 7270 - DNA, 24 bp, Artificial Sequence
  Chr7q_4 Reverse Primer
gaacatgaatctatccactcctca

SEQ ID NO: 7271 - DNA, 21 bp, Artificial Sequence
  Chr7q_4 Reverse Primer
cagtctgcctccaaatttctg

SEQ ID NO: 7272 - DNA, 20 bp, Artificial Sequence
  Chr7q_4 Reverse Primer
ataaggttttccacgcgttc

SEQ ID NO: 7273 - DNA, 20 bp, Artificial Sequence
  Chr7q_4 Reverse Primer
cgccacatttgtttctcctt

SEQ ID NO: 7274 - DNA, 20 bp, Artificial Sequence
  Chr7q_4 Reverse Primer
atgaggccctttgaggttct

SEQ ID NO: 7275 - DNA, 20 bp, Artificial Sequence
  Chr7q_4 Reverse Primer
gccagggaaatgatgacaat

SEQ ID NO: 7276 - DNA, 24 bp, Artificial Sequence
  Chr7q_4 Reverse Primer
agtctatgccatgctaggatattt

SEQ ID NO: 7277 - DNA, 22 bp, Artificial Sequence
  Chr7q_4 Reverse Primer
ttgaacaaaacctaggaaaggg

SEQ ID NO: 7278 - DNA, 20 bp, Artificial Sequence
  Chr7q_4 Reverse Primer
cctggtggtaacatcggtct

SEQ ID NO: 7279 - DNA, 23 bp, Artificial Sequence
  Chr7q_4 Reverse Primer
ttgttactgagttgcttttgtcc

SEQ ID NO: 7280 - DNA, 20 bp, Artificial Sequence
  Chr7q_4 Reverse Primer
ttcctcggctctaagtccac

SEQ ID NO: 7281 - DNA, 22 bp, Artificial Sequence
  Chr7q_4 Reverse Primer
tcccacagtatctccagatcaa

SEQ ID NO: 7282 - DNA, 21 bp, Artificial Sequence
  Chr7q_4 Reverse Primer
ttgattccaccaaccactttc

SEQ ID NO: 7283 - DNA, 20 bp, Artificial Sequence
  Chr7q_4 Reverse Primer
tggagatgccacattaagca

SEQ ID NO: 7284 - DNA, 23 bp, Artificial Sequence
  Chr7q_4 Reverse Primer
tttgactagtgggttctcctgtt

SEQ ID NO: 7285 - DNA, 20 bp, Artificial Sequence
  Chr7q_4 Reverse Primer
ggcacctgatggatgaattt

SEQ ID NO: 7286 - DNA, 21 bp, Artificial Sequence
  Chr7q_4 Reverse Primer
cctttgtaaaatcgtgatgcc

SEQ ID NO: 7287 - DNA, 20 bp, Artificial Sequence
  Chr7q_4 Reverse Primer
aaatcacggatttaaggccc

SEQ ID NO: 7288 - DNA, 20 bp, Artificial Sequence
  Chr7q_4 Reverse Primer
aggcacaggatatgaaagcc

SEQ ID NO: 7289 - DNA, 20 bp, Artificial Sequence
  Chr7q_4 Reverse Primer
tacagcgtgagcatcaggac

SEQ ID NO: 7290 - DNA, 22 bp, Artificial Sequence
  Chr7q_4 Reverse Primer
tcagaagttgcagctgaaaaac

SEQ ID NO: 7291 - DNA, 20 bp, Artificial Sequence
  Chr7q_4 Reverse Primer
cacccagcatgtataggcac

SEQ ID NO: 7292 - DNA, 19 bp, Artificial Sequence
  Chr7q_4 Reverse Primer
ggaccgaacagagcagtga

SEQ ID NO: 7293 - DNA, 22 bp, Artificial Sequence
  Chr7q_4 Reverse Primer
gcagagtttgacagttctgctg

SEQ ID NO: 7294 - DNA, 20 bp, Artificial Sequence
  Chr7q_4 Reverse Primer
aggactcagcatgtgccatt

SEQ ID NO: 7295 - DNA, 21 bp, Artificial Sequence
  Chr7q_4 Reverse Primer
agctcacatctgacccatttg

SEQ ID NO: 7296 - DNA, 20 bp, Artificial Sequence
  Chr7q_4 Reverse Primer
tcagcatggggaaattgact

SEQ ID NO: 7297 - DNA, 20 bp, Artificial Sequence
  Chr7q_4 Reverse Primer
cctctgctttggtgatcaga

SEQ ID NO: 7298 - DNA, 20 bp, Artificial Sequence
  Chr7q_4 Reverse Primer
agagggggaatctgaatggt

SEQ ID NO: 7299 - DNA, 20 bp, Artificial Sequence
  Chr7q_4 Reverse Primer
ggttagttctcccaggaccc

SEQ ID NO: 7300 - DNA, 20 bp, Artificial Sequence
  Chr7q_4 Reverse Primer
gaaaccattccgggacagta

SEQ ID NO: 7301 - DNA, 21 bp, Artificial Sequence
  Chr7q_4 Reverse Primer
gactgtgttccacattccaca

SEQ ID NO: 7302 - DNA, 20 bp, Artificial Sequence
  Chr7q_4 Reverse Primer
attcaagggctcagtgttgc

SEQ ID NO: 7303 - DNA, 20 bp, Artificial Sequence
  Chr7q_4 Reverse Primer
cgtcattatgcagcacatca

SEQ ID NO: 7304 - DNA, 20 bp, Artificial Sequence
  Chr7q_4 Reverse Primer
tcctccctgtgtccctacag

SEQ ID NO: 7305 - DNA, 20 bp, Artificial Sequence
  Chr7q_4 Reverse Primer
tgtttctgggaactaacggg

SEQ ID NO: 7306 - DNA, 20 bp, Artificial Sequence
  Chr7q_4 Reverse Primer
ataaaggctgcccaccagat

SEQ ID NO: 7307 - DNA, 20 bp, Artificial Sequence
  Chr7q_4 Reverse Primer
attggaagcggatcactgtc

SEQ ID NO: 7308 - DNA, 20 bp, Artificial Sequence
  Chr7q_4 Reverse Primer
ggccatgatttttgtttgct

SEQ ID NO: 7309 - DNA, 20 bp, Artificial Sequence
  Chr7q_4 Reverse Primer
tggtatcgaatccaaggagg

SEQ ID NO: 7310 - DNA, 20 bp, Artificial Sequence
  Chr7q_4 Reverse Primer
gctcactccagctttctggt

SEQ ID NO: 7311 - DNA, 20 bp, Artificial Sequence
  Chr7q_4 Reverse Primer
atgtgccctcgttctaggag

SEQ ID NO: 7312 - DNA, 20 bp, Artificial Sequence
  Chr7q_4 Reverse Primer
tttttgccagggagattgag

SEQ ID NO: 7313 - DNA, 21 bp, Artificial Sequence
  Chr7q_5 Forward Primer
tgtaggggaagtgatctctgg

SEQ ID NO: 7314 - DNA, 20 bp, Artificial Sequence
  Chr7q_5 Forward Primer
taaaaatgcaggttgctggg

SEQ ID NO: 7315 - DNA, 22 bp, Artificial Sequence
  Chr7q_5 Forward Primer
accatctcctgatttcttaacg

SEQ ID NO: 7316 - DNA, 20 bp, Artificial Sequence
  Chr7q_5 Forward Primer
aataaagacattttgcgggc

SEQ ID NO: 7317 - DNA, 20 bp, Artificial Sequence
  Chr7q_5 Forward Primer
aaaatctttgcccctcgtct

SEQ ID NO: 7318 - DNA, 20 bp, Artificial Sequence
  Chr7q_5 Forward Primer
atgaagctagggatttgggg

SEQ ID NO: 7319 - DNA, 21 bp, Artificial Sequence
  Chr7q_5 Forward Primer
tcatgggaaaaatagcaagga

SEQ ID NO: 7320 - DNA, 21 bp, Artificial Sequence
  Chr7q_5 Forward Primer
gctcctgttcattcctgttga

SEQ ID NO: 7321 - DNA, 26 bp, Artificial Sequence
  Chr7q_5 Forward Primer
tcaaactgaagaaaaagaatacagag

SEQ ID NO: 7322 - DNA, 20 bp, Artificial Sequence
  Chr7q_5 Forward Primer
tatagggatgggggtgacaa

SEQ ID NO: 7323 - DNA, 20 bp, Artificial Sequence
  Chr7q_5 Forward Primer
tgaagtggcagaggttgatg

SEQ ID NO: 7324 - DNA, 20 bp, Artificial Sequence
  Chr7q_5 Forward Primer
ggatcaaggtggagcaatgt

SEQ ID NO: 7325 - DNA, 20 bp, Artificial Sequence
  Chr7q_5 Forward Primer
ggcagaaggtaaaggaaggc

SEQ ID NO: 7326 - DNA, 20 bp, Artificial Sequence
  Chr7q_5 Forward Primer
tgtgtcaggcactgggtaga

SEQ ID NO: 7327 - DNA, 20 bp, Artificial Sequence
  Chr7q_5 Forward Primer
tcttcacaacaggctgacct

SEQ ID NO: 7328 - DNA, 21 bp, Artificial Sequence
  Chr7q_5 Forward Primer
gaagttcaaatcctgttggca

SEQ ID NO: 7329 - DNA, 20 bp, Artificial Sequence
  Chr7q_5 Forward Primer
ttggatgcaagggacaattt

SEQ ID NO: 7330 - DNA, 20 bp, Artificial Sequence
  Chr7q_5 Forward Primer
aagtctcgacaatgcaccaa

SEQ ID NO: 7331 - DNA, 20 bp, Artificial Sequence
  Chr7q_5 Forward Primer
gctggcaagggtctcttgta

SEQ ID NO: 7332 - DNA, 20 bp, Artificial Sequence
  Chr7q_5 Forward Primer
tgggtcctaggctgaaaatg

SEQ ID NO: 7333 - DNA, 20 bp, Artificial Sequence
  Chr7q_5 Forward Primer
tgagaggggagaaagcaaaa

SEQ ID NO: 7334 - DNA, 20 bp, Artificial Sequence
  Chr7q_5 Forward Primer
tgcttatcctcctcctccag

SEQ ID NO: 7335 - DNA, 20 bp, Artificial Sequence
  Chr7q_5 Forward Primer
tggtatttgatgcaggctga

SEQ ID NO: 7336 - DNA, 23 bp, Artificial Sequence
  Chr7q_5 Forward Primer
tggaaaagaagaaacaattcacc

SEQ ID NO: 7337 - DNA, 21 bp, Artificial Sequence
  Chr7q_5 Forward Primer
aaagtcacagcctgaggcata

SEQ ID NO: 7338 - DNA, 20 bp, Artificial Sequence
  Chr7q_5 Forward Primer
taacaacgaggcacagttgc

SEQ ID NO: 7339 - DNA, 20 bp, Artificial Sequence
  Chr7q_5 Forward Primer
tcacaggaaacaggagggtc

SEQ ID NO: 7340 - DNA, 20 bp, Artificial Sequence
  Chr7q_5 Forward Primer
actgggtcttgtttcttgcc

SEQ ID NO: 7341 - DNA, 26 bp, Artificial Sequence
  Chr7q_5 Forward Primer
tgcaattaaagttttaccaatgtacc

SEQ ID NO: 7342 - DNA, 20 bp, Artificial Sequence
  Chr7q_5 Forward Primer
cagggggcagcactagataa

SEQ ID NO: 7343 - DNA, 20 bp, Artificial Sequence
  Chr7q_5 Forward Primer
accgaaatagaacctgctgc

SEQ ID NO: 7344 - DNA, 20 bp, Artificial Sequence
  Chr7q_5 Forward Primer
cccctgcattttgttttgtt

SEQ ID NO: 7345 - DNA, 20 bp, Artificial Sequence
  Chr7q_5 Forward Primer
gttttaagccagccttgcag

SEQ ID NO: 7346 - DNA, 23 bp, Artificial Sequence
  Chr7q_5 Forward Primer
tgatgtatgtagtgcagattgcc

SEQ ID NO: 7347 - DNA, 20 bp, Artificial Sequence
  Chr7q_5 Forward Primer
ttctattgggaaatgtggca

SEQ ID NO: 7348 - DNA, 21 bp, Artificial Sequence
  Chr7q_5 Forward Primer
tcgggaataaagaccacacag

SEQ ID NO: 7349 - DNA, 22 bp, Artificial Sequence
  Chr7q_5 Forward Primer
ttcagggtagtttgaggagtca

SEQ ID NO: 7350 - DNA, 20 bp, Artificial Sequence
  Chr7q_5 Forward Primer
agacctattcctgcttgcca

SEQ ID NO: 7351 - DNA, 20 bp, Artificial Sequence
  Chr7q_5 Forward Primer
tgacgcattaaggcgatttt

SEQ ID NO: 7352 - DNA, 20 bp, Artificial Sequence
  Chr7q_5 Forward Primer
atgaataccagcttggaccg

SEQ ID NO: 7353 - DNA, 22 bp, Artificial Sequence
  Chr7q_5 Forward Primer
gacagtgatgttgaagggtgaa

SEQ ID NO: 7354 - DNA, 21 bp, Artificial Sequence
  Chr7q_5 Forward Primer
tcagtcaggaccacacaagaa

SEQ ID NO: 7355 - DNA, 20 bp, Artificial Sequence
  Chr7q_5 Forward Primer
gactggcattcccagaaaaa

SEQ ID NO: 7356 - DNA, 20 bp, Artificial Sequence
  Chr7q_5 Forward Primer
cctttcccaaatccctccta

SEQ ID NO: 7357 - DNA, 20 bp, Artificial Sequence
  Chr7q_5 Forward Primer
ttcagccatggcaataatga

SEQ ID NO: 7358 - DNA, 20 bp, Artificial Sequence
  Chr7q_5 Forward Primer
acttggcgaccttgtgtttt

SEQ ID NO: 7359 - DNA, 20 bp, Artificial Sequence
  Chr7q_5 Forward Primer
cagtcaaaaccctgcacctt

SEQ ID NO: 7360 - DNA, 20 bp, Artificial Sequence
  Chr7q_5 Forward Primer
cactccaccccatctcagtt

SEQ ID NO: 7361 - DNA, 20 bp, Artificial Sequence
  Chr7q_5 Forward Primer
cctcccactgcacttaggat

SEQ ID NO: 7362 - DNA, 20 bp, Artificial Sequence
  Chr7q_5 Forward Primer
tggctggatccttctcatct

SEQ ID NO: 7363 - DNA, 20 bp, Artificial Sequence
  Chr7q_5 Forward Primer
catgcctggtgcctagaagt

SEQ ID NO: 7364 - DNA, 23 bp, Artificial Sequence
  Chr7q_5 Forward Primer
gctatcagtcctgtctctctgga

SEQ ID NO: 7365 - DNA, 24 bp, Artificial Sequence
  Chr7q_5 Forward Primer
tcagaaaaatatcctgacaactgc

SEQ ID NO: 7366 - DNA, 20 bp, Artificial Sequence
  Chr7q_5 Forward Primer
aggggaggattgaaaaccat

SEQ ID NO: 7367 - DNA, 20 bp, Artificial Sequence
  Chr7q_5 Forward Primer
tggtgacatttgcataggga

SEQ ID NO: 7368 - DNA, 20 bp, Artificial Sequence
  Chr7q_5 Forward Primer
aaacaccattgggaaagcaa

SEQ ID NO: 7369 - DNA, 24 bp, Artificial Sequence
  Chr7q_5 Forward Primer
tccagacatgaatgtcattatcaa

SEQ ID NO: 7370 - DNA, 20 bp, Artificial Sequence
  Chr7q_5 Forward Primer
tgaccacctaccaaagcctc

SEQ ID NO: 7371 - DNA, 20 bp, Artificial Sequence
  Chr7q_5 Forward Primer
taggtccaggagtggacagg

SEQ ID NO: 7372 - DNA, 20 bp, Artificial Sequence
  Chr7q_5 Forward Primer
gcttccctgctttcagattg

SEQ ID NO: 7373 - DNA, 20 bp, Artificial Sequence
  Chr7q_5 Forward Primer
atgctttggctcatacccag

SEQ ID NO: 7374 - DNA, 25 bp, Artificial Sequence
  Chr7q_5 Forward Primer
ttaccattttatgaccaatgaaaaa

SEQ ID NO: 7375 - DNA, 20 bp, Artificial Sequence
  Chr7q_5 Forward Primer
gatatggagtgggaccgcta

SEQ ID NO: 7376 - DNA, 20 bp, Artificial Sequence
  Chr7q_5 Forward Primer
ccatgctgatctccaggatt

SEQ ID NO: 7377 - DNA, 20 bp, Artificial Sequence
  Chr7q_5 Forward Primer
tggggtcctcttttctcaag

SEQ ID NO: 7378 - DNA, 24 bp, Artificial Sequence
  Chr7q_5 Forward Primer
tgcagttctgatatcttctcaagg

SEQ ID NO: 7379 - DNA, 20 bp, Artificial Sequence
  Chr7q_5 Forward Primer
gtctgtctgctgcattttgg

SEQ ID NO: 7380 - DNA, 20 bp, Artificial Sequence
  Chr7q_5 Forward Primer
tgtttaatggaaacgagcca

SEQ ID NO: 7381 - DNA, 20 bp, Artificial Sequence
  Chr7q_5 Forward Primer
tgggaagagacacttgctga

SEQ ID NO: 7382 - DNA, 26 bp, Artificial Sequence
  Chr7q_5 Forward Primer
tccttaaagccataagatacaaaacc

SEQ ID NO: 7383 - DNA, 20 bp, Artificial Sequence
  Chr7q_5 Forward Primer
gagctctcaggggtctcctc

SEQ ID NO: 7384 - DNA, 20 bp, Artificial Sequence
  Chr7q_5 Forward Primer
tttgctcccactgaccttct

SEQ ID NO: 7385 - DNA, 20 bp, Artificial Sequence
  Chr7q_5 Forward Primer
atggcttaggaggttgctga

SEQ ID NO: 7386 - DNA, 20 bp, Artificial Sequence
  Chr7q_5 Forward Primer
aattatttggggtggggttc

SEQ ID NO: 7387 - DNA, 20 bp, Artificial Sequence
  Chr7q_5 Forward Primer
ctggcaacatgagatgtgct

SEQ ID NO: 7388 - DNA, 20 bp, Artificial Sequence
  Chr7q_5 Forward Primer
cagccgtcaggaaatgtttt

SEQ ID NO: 7389 - DNA, 20 bp, Artificial Sequence
  Chr7q_5 Forward Primer
ttaggagagagggcaacgag

SEQ ID NO: 7390 - DNA, 20 bp, Artificial Sequence
  Chr7q_5 Forward Primer
ggttggtgtcaactgacggt

SEQ ID NO: 7391 - DNA, 25 bp, Artificial Sequence
  Chr7q_5 Forward Primer
ccaatgaataattttacaagttggc

SEQ ID NO: 7392 - DNA, 21 bp, Artificial Sequence
  Chr7q_5 Forward Primer
ctctagtcttgatgcctggga

SEQ ID NO: 7393 - DNA, 21 bp, Artificial Sequence
  Chr7q_5 Forward Primer
gaccttaatgaagccagggag

SEQ ID NO: 7394 - DNA, 20 bp, Artificial Sequence
  Chr7q_5 Forward Primer
aaacaatgaaggggaggcat

SEQ ID NO: 7395 - DNA, 20 bp, Artificial Sequence
  Chr7q_5 Forward Primer
ggggaatagtttgggatggt

SEQ ID NO: 7396 - DNA, 20 bp, Artificial Sequence
  Chr7q_5 Forward Primer
aaatattgagcctcaggggg

SEQ ID NO: 7397 - DNA, 20 bp, Artificial Sequence
  Chr7q_5 Forward Primer
ggagggagatgaaaatgtgg

SEQ ID NO: 7398 - DNA, 26 bp, Artificial Sequence
  Chr7q_5 Forward Primer
caaaggggtatagttgtatagcaaag

SEQ ID NO: 7399 - DNA, 20 bp, Artificial Sequence
  Chr7q_5 Forward Primer
cagtggctttgaggatgttg

SEQ ID NO: 7400 - DNA, 20 bp, Artificial Sequence
  Chr7q_5 Forward Primer
tctatgacgctgcaatttgg

SEQ ID NO: 7401 - DNA, 20 bp, Artificial Sequence
  Chr7q_5 Forward Primer
cagcccttcctctgtttcac

SEQ ID NO: 7402 - DNA, 20 bp, Artificial Sequence
  Chr7q_5 Forward Primer
ttggcctcactaaaatggct

SEQ ID NO: 7403 - DNA, 20 bp, Artificial Sequence
  Chr7q_5 Forward Primer
atgatgctgtgatgccagtc

SEQ ID NO: 7404 - DNA, 25 bp, Artificial Sequence
  Chr7q_5 Forward Primer
tgactaacatgaggtgtctcttcac

SEQ ID NO: 7405 - DNA, 20 bp, Artificial Sequence
  Chr7q_5 Forward Primer
gtgagatgggaatgcagctt

SEQ ID NO: 7406 - DNA, 20 bp, Artificial Sequence
  Chr7q_5 Forward Primer
ctcctgtaattgctctgggg

SEQ ID NO: 7407 - DNA, 22 bp, Artificial Sequence
  Chr7q_5 Forward Primer
tctctcagggttactgattccc

SEQ ID NO: 7408 - DNA, 21 bp, Artificial Sequence
  Chr7q_5 Forward Primer
tgttggaccatacatttggct

SEQ ID NO: 7409 - DNA, 21 bp, Artificial Sequence
  Chr7q_5 Reverse Primer
tgttctgtgtagcaagagcct

SEQ ID NO: 7410 - DNA, 20 bp, Artificial Sequence
  Chr7q_5 Reverse Primer
actggcatatcatgcactgg

SEQ ID NO: 7411 - DNA, 23 bp, Artificial Sequence
  Chr7q_5 Reverse Primer
tgcagatgagttatgctgtgttc

SEQ ID NO: 7412 - DNA, 20 bp, Artificial Sequence
  Chr7q_5 Reverse Primer
aagccattcatttacgtggg

SEQ ID NO: 7413 - DNA, 20 bp, Artificial Sequence
  Chr7q_5 Reverse Primer
catgcaggacagcaatcaac

SEQ ID NO: 7414 - DNA, 20 bp, Artificial Sequence
  Chr7q_5 Reverse Primer
ggccttcatgtaggggagtt

SEQ ID NO: 7415 - DNA, 23 bp, Artificial Sequence
  Chr7q_5 Reverse Primer
caagagatgagacctagctttgg

SEQ ID NO: 7416 - DNA, 20 bp, Artificial Sequence
  Chr7q_5 Reverse Primer
ctcactggccccttcttcta

SEQ ID NO: 7417 - DNA, 21 bp, Artificial Sequence
  Chr7q_5 Reverse Primer
ggaaaacttgaaatgggacaa

SEQ ID NO: 7418 - DNA, 22 bp, Artificial Sequence
  Chr7q_5 Reverse Primer
gcaatcatctctacctcctttg

SEQ ID NO: 7419 - DNA, 20 bp, Artificial Sequence
  Chr7q_5 Reverse Primer
aaggcatgagtgattgggag

SEQ ID NO: 7420 - DNA, 20 bp, Artificial Sequence
  Chr7q_5 Reverse Primer
tctgcccccattaagctatg

SEQ ID NO: 7421 - DNA, 20 bp, Artificial Sequence
  Chr7q_5 Reverse Primer
ccaaaagtgtgcaaaaccct

SEQ ID NO: 7422 - DNA, 20 bp, Artificial Sequence
  Chr7q_5 Reverse Primer
agtgatgaaaagcatggcct

SEQ ID NO: 7423 - DNA, 21 bp, Artificial Sequence
  Chr7q_5 Reverse Primer
catagccgaagtggatttgaa

SEQ ID NO: 7424 - DNA, 20 bp, Artificial Sequence
  Chr7q_5 Reverse Primer
accctggacatttggacttg

SEQ ID NO: 7425 - DNA, 25 bp, Artificial Sequence
  Chr7q_5 Reverse Primer
cctctgtttaatcatgacctcaagt

SEQ ID NO: 7426 - DNA, 20 bp, Artificial Sequence
  Chr7q_5 Reverse Primer
ttgcccttttcagaggagtg

SEQ ID NO: 7427 - DNA, 20 bp, Artificial Sequence
  Chr7q_5 Reverse Primer
gaccacaggggaagattcaa

SEQ ID NO: 7428 - DNA, 20 bp, Artificial Sequence
  Chr7q_5 Reverse Primer
agccaggcaagacaaattga

SEQ ID NO: 7429 - DNA, 20 bp, Artificial Sequence
  Chr7q_5 Reverse Primer
tgcagccaactctgaaattg

SEQ ID NO: 7430 - DNA, 22 bp, Artificial Sequence
  Chr7q_5 Reverse Primer
gatccaatggtcttgactaccc

SEQ ID NO: 7431 - DNA, 20 bp, Artificial Sequence
  Chr7q_5 Reverse Primer
acccttacctgcttcccagt

SEQ ID NO: 7432 - DNA, 20 bp, Artificial Sequence
  Chr7q_5 Reverse Primer
tttagcaagaacgcatccag

SEQ ID NO: 7433 - DNA, 20 bp, Artificial Sequence
  Chr7q_5 Reverse Primer
cactggcctacaaggttgct

SEQ ID NO: 7434 - DNA, 20 bp, Artificial Sequence
  Chr7q_5 Reverse Primer
aaagagggggtttgcatgtt

SEQ ID NO: 7435 - DNA, 20 bp, Artificial Sequence
  Chr7q_5 Reverse Primer
gctagcacagcatgaaacca

SEQ ID NO: 7436 - DNA, 20 bp, Artificial Sequence
  Chr7q_5 Reverse Primer
gtggacggtgcagtaggaat

SEQ ID NO: 7437 - DNA, 20 bp, Artificial Sequence
  Chr7q_5 Reverse Primer
tccctctgcacttcatgcta

SEQ ID NO: 7438 - DNA, 20 bp, Artificial Sequence
  Chr7q_5 Reverse Primer
ggaaaatatttggggtggaa

SEQ ID NO: 7439 - DNA, 20 bp, Artificial Sequence
  Chr7q_5 Reverse Primer
ggaaagtgccactgtaccca

SEQ ID NO: 7440 - DNA, 20 bp, Artificial Sequence
  Chr7q_5 Reverse Primer
taaggctgcatccacatgac

SEQ ID NO: 7441 - DNA, 22 bp, Artificial Sequence
  Chr7q_5 Reverse Primer
ggaaaagagatggatggaaaga

SEQ ID NO: 7442 - DNA, 20 bp, Artificial Sequence
  Chr7q_5 Reverse Primer
ctgcctcctttgaaagcatc

SEQ ID NO: 7443 - DNA, 20 bp, Artificial Sequence
  Chr7q_5 Reverse Primer
tgccctcagcaatttttctc

SEQ ID NO: 7444 - DNA, 20 bp, Artificial Sequence
  Chr7q_5 Reverse Primer
acacagccggaaggtcatac

SEQ ID NO: 7445 - DNA, 20 bp, Artificial Sequence
  Chr7q_5 Reverse Primer
cagcaccagtgattaccacc

SEQ ID NO: 7446 - DNA, 20 bp, Artificial Sequence
  Chr7q_5 Reverse Primer
tcccaggtgttcaagtcaga

SEQ ID NO: 7447 - DNA, 20 bp, Artificial Sequence
  Chr7q_5 Reverse Primer
ccagaggctttcaagaccat

SEQ ID NO: 7448 - DNA, 21 bp, Artificial Sequence
  Chr7q_5 Reverse Primer
cagtcccatattgttccctga

SEQ ID NO: 7449 - DNA, 20 bp, Artificial Sequence
  Chr7q_5 Reverse Primer
gggtcattggctaaacgcta

SEQ ID NO: 7450 - DNA, 22 bp, Artificial Sequence
  Chr7q_5 Reverse Primer
tgctttagttggattttagcca

SEQ ID NO: 7451 - DNA, 20 bp, Artificial Sequence
  Chr7q_5 Reverse Primer
cttgcttttcacaagggagg

SEQ ID NO: 7452 - DNA, 20 bp, Artificial Sequence
  Chr7q_5 Reverse Primer
gtcctccctggcatttcata

SEQ ID NO: 7453 - DNA, 21 bp, Artificial Sequence
  Chr7q_5 Reverse Primer
ttgtaagagccactgaccctc

SEQ ID NO: 7454 - DNA, 20 bp, Artificial Sequence
  Chr7q_5 Reverse Primer
cagtgcttgccaaggagtta

SEQ ID NO: 7455 - DNA, 20 bp, Artificial Sequence
  Chr7q_5 Reverse Primer
agctcatgggagcaactgaa

SEQ ID NO: 7456 - DNA, 20 bp, Artificial Sequence
  Chr7q_5 Reverse Primer
ctggcagggaagacagaagt

SEQ ID NO: 7457 - DNA, 20 bp, Artificial Sequence
  Chr7q_5 Reverse Primer
tgttaagggccaagaaagca

SEQ ID NO: 7458 - DNA, 20 bp, Artificial Sequence
  Chr7q_5 Reverse Primer
caccctcaaggcactgaaat

SEQ ID NO: 7459 - DNA, 20 bp, Artificial Sequence
  Chr7q_5 Reverse Primer
ggctttagtggccaaaatca

SEQ ID NO: 7460 - DNA, 26 bp, Artificial Sequence
  Chr7q_5 Reverse Primer
ttttgagattaaaggtaatgaggacc

SEQ ID NO: 7461 - DNA, 22 bp, Artificial Sequence
  Chr7q_5 Reverse Primer
ggagacagctcttcaaaaatgc

SEQ ID NO: 7462 - DNA, 20 bp, Artificial Sequence
  Chr7q_5 Reverse Primer
tggcacagtcattcacaagt

SEQ ID NO: 7463 - DNA, 20 bp, Artificial Sequence
  Chr7q_5 Reverse Primer
cctatctcccactgggtcaa

SEQ ID NO: 7464 - DNA, 20 bp, Artificial Sequence
  Chr7q_5 Reverse Primer
tgtgagatggaaaaatgcca

SEQ ID NO: 7465 - DNA, 20 bp, Artificial Sequence
  Chr7q_5 Reverse Primer
tgccttaatgattccccaaa

SEQ ID NO: 7466 - DNA, 20 bp, Artificial Sequence
  Chr7q_5 Reverse Primer
gagtccaaggctgcactctc

SEQ ID NO: 7467 - DNA, 20 bp, Artificial Sequence
  Chr7q_5 Reverse Primer
gagcgcaggaggacttctta

SEQ ID NO: 7468 - DNA, 20 bp, Artificial Sequence
  Chr7q_5 Reverse Primer
aatggtgatgccactaagcc

SEQ ID NO: 7469 - DNA, 21 bp, Artificial Sequence
  Chr7q_5 Reverse Primer
ttcataatttggaaccgatgg

SEQ ID NO: 7470 - DNA, 25 bp, Artificial Sequence
  Chr7q_5 Reverse Primer
ccagattatggctcattaaaagatt

SEQ ID NO: 7471 - DNA, 21 bp, Artificial Sequence
  Chr7q_5 Reverse Primer
ttttgggtggacagattatgc

SEQ ID NO: 7472 - DNA, 22 bp, Artificial Sequence
  Chr7q_5 Reverse Primer
ttccttagggagaaaggaaatg

SEQ ID NO: 7473 - DNA, 20 bp, Artificial Sequence
  Chr7q_5 Reverse Primer
acagggcccacatatggtaa

SEQ ID NO: 7474 - DNA, 25 bp, Artificial Sequence
  Chr7q_5 Reverse Primer
tgaaggccaatttcataagaagtaa

SEQ ID NO: 7475 - DNA, 20 bp, Artificial Sequence
  Chr7q_5 Reverse Primer
tgagctgctgttatggcatt

SEQ ID NO: 7476 - DNA, 20 bp, Artificial Sequence
  Chr7q_5 Reverse Primer
agcaggcattttacagagca

SEQ ID NO: 7477 - DNA, 20 bp, Artificial Sequence
  Chr7q_5 Reverse Primer
gccaattgcttttccttttc

SEQ ID NO: 7478 - DNA, 20 bp, Artificial Sequence
  Chr7q_5 Reverse Primer
ataggatgggacagaagggc

SEQ ID NO: 7479 - DNA, 20 bp, Artificial Sequence
  Chr7q_5 Reverse Primer
tgcatcaacccaccattcta

SEQ ID NO: 7480 - DNA, 20 bp, Artificial Sequence
  Chr7q_5 Reverse Primer
tctgcatcctccaaagttga

SEQ ID NO: 7481 - DNA, 20 bp, Artificial Sequence
  Chr7q_5 Reverse Primer
agttttgtcctttgcgtgct

SEQ ID NO: 7482 - DNA, 20 bp, Artificial Sequence
  Chr7q_5 Reverse Primer
ggtgattacaacccccacag

SEQ ID NO: 7483 - DNA, 24 bp, Artificial Sequence
  Chr7q_5 Reverse Primer
ttgtgacaataagaaaacatgagg

SEQ ID NO: 7484 - DNA, 20 bp, Artificial Sequence
  Chr7q_5 Reverse Primer
ccaaactaaggccaaaccaa

SEQ ID NO: 7485 - DNA, 20 bp, Artificial Sequence
  Chr7q_5 Reverse Primer
ccaatgtgacaaaatggcaa

SEQ ID NO: 7486 - DNA, 25 bp, Artificial Sequence
  Chr7q_5 Reverse Primer
tcataagagtttcacagattgttca

SEQ ID NO: 7487 - DNA, 20 bp, Artificial Sequence
  Chr7q_5 Reverse Primer
tctttgggggctgtttaatg

SEQ ID NO: 7488 - DNA, 20 bp, Artificial Sequence
  Chr7q_5 Reverse Primer
actcctccctatccccacat

SEQ ID NO: 7489 - DNA, 20 bp, Artificial Sequence
  Chr7q_5 Reverse Primer
gctttacatgagctggtccc

SEQ ID NO: 7490 - DNA, 20 bp, Artificial Sequence
  Chr7q_5 Reverse Primer
tgctcctttccttgatgtcc

SEQ ID NO: 7491 - DNA, 20 bp, Artificial Sequence
  Chr7q_5 Reverse Primer
cacccccaggtaatgaattg

SEQ ID NO: 7492 - DNA, 20 bp, Artificial Sequence
  Chr7q_5 Reverse Primer
ttaaggccacccatcatctc

SEQ ID NO: 7493 - DNA, 20 bp, Artificial Sequence
  Chr7q_5 Reverse Primer
tttgcccctgcaattatctc

SEQ ID NO: 7494 - DNA, 21 bp, Artificial Sequence
  Chr7q_5 Reverse Primer
tttgcacccattcttcaaact

SEQ ID NO: 7495 - DNA, 20 bp, Artificial Sequence
  Chr7q_5 Reverse Primer
gcatgcaaatcattcactgg

SEQ ID NO: 7496 - DNA, 21 bp, Artificial Sequence
  Chr7q_5 Reverse Primer
cacccacctggaatataccct

SEQ ID NO: 7497 - DNA, 20 bp, Artificial Sequence
  Chr7q_5 Reverse Primer
atgcaaacaggagcagaacc

SEQ ID NO: 7498 - DNA, 20 bp, Artificial Sequence
  Chr7q_5 Reverse Primer
gtagctccagagagcaacgg

SEQ ID NO: 7499 - DNA, 20 bp, Artificial Sequence
  Chr7q_5 Reverse Primer
cctttctgtggcccaattta

SEQ ID NO: 7500 - DNA, 20 bp, Artificial Sequence
  Chr7q_5 Reverse Primer
tgtggcataaaccagaagca

SEQ ID NO: 7501 - DNA, 20 bp, Artificial Sequence
  Chr7q_5 Reverse Primer
tcccaggtgttctgataggc

SEQ ID NO: 7502 - DNA, 20 bp, Artificial Sequence
  Chr7q_5 Reverse Primer
ttcaacaagacctgtgggtg

SEQ ID NO: 7503 - DNA, 25 bp, Artificial Sequence
  Chr7q_5 Reverse Primer
tccccttaaatcatctcttaaacaa

SEQ ID NO: 7504 - DNA, 23 bp, Artificial Sequence
  Chr7q_5 Reverse Primer
aagggaagattttattcccaatg

SEQ ID NO: 7505 - DNA, 21 bp, Artificial Sequence
  Chr7q_6 Forward Primer
gcctcattaattgctgattgg

SEQ ID NO: 7506 - DNA, 20 bp, Artificial Sequence
  Chr7q_6 Forward Primer
gcaggacattggagaaagga

SEQ ID NO: 7507 - DNA, 20 bp, Artificial Sequence
  Chr7q_6 Forward Primer
tttattggagaagggcgttg

SEQ ID NO: 7508 - DNA, 24 bp, Artificial Sequence
  Chr7q_6 Forward Primer
aaagaagttttcaagaaagagcac

SEQ ID NO: 7509 - DNA, 21 bp, Artificial Sequence
  Chr7q_6 Forward Primer
tgcatttcaatttagcaccaa

SEQ ID NO: 7510 - DNA, 20 bp, Artificial Sequence
  Chr7q_6 Forward Primer
atgagcgttcatatccctgc

SEQ ID NO: 7511 - DNA, 20 bp, Artificial Sequence
  Chr7q_6 Forward Primer
gggacttttgagagtgggaa

SEQ ID NO: 7512 - DNA, 24 bp, Artificial Sequence
  Chr7q_6 Forward Primer
tttggcacattcaaaagtaaattc

SEQ ID NO: 7513 - DNA, 27 bp, Artificial Sequence
  Chr7q_6 Forward Primer
ttcatcttttgagctaatctaactttg

SEQ ID NO: 7514 - DNA, 27 bp, Artificial Sequence
  Chr7q_6 Forward Primer
taatatgaaattcctgctacagtaaaa

SEQ ID NO: 7515 - DNA, 20 bp, Artificial Sequence
  Chr7q_6 Forward Primer
ggcctactcaaagcttccct

SEQ ID NO: 7516 - DNA, 22 bp, Artificial Sequence
  Chr7q_6 Forward Primer
tccatgattgttcctactttgg

SEQ ID NO: 7517 - DNA, 21 bp, Artificial Sequence
  Chr7q_6 Forward Primer
gattgtatcagcccaaaacca

SEQ ID NO: 7518 - DNA, 20 bp, Artificial Sequence
  Chr7q_6 Forward Primer
attcatcaccccttgttcca

SEQ ID NO: 7519 - DNA, 21 bp, Artificial Sequence
  Chr7q_6 Forward Primer
gagcatcagaactacacccca

SEQ ID NO: 7520 - DNA, 20 bp, Artificial Sequence
  Chr7q_6 Forward Primer
gccaaacaaaatcactgcct

SEQ ID NO: 7521 - DNA, 20 bp, Artificial Sequence
  Chr7q_6 Forward Primer
gaaggcagtccagttatcgc

SEQ ID NO: 7522 - DNA, 20 bp, Artificial Sequence
  Chr7q_6 Forward Primer
tgtagctgcatgtcaaagca

SEQ ID NO: 7523 - DNA, 20 bp, Artificial Sequence
  Chr7q_6 Forward Primer
ctgctgaagcaaacacagga

SEQ ID NO: 7524 - DNA, 23 bp, Artificial Sequence
  Chr7q_6 Forward Primer
tgtgaaaaagtgtgagagcagaa

SEQ ID NO: 7525 - DNA, 24 bp, Artificial Sequence
  Chr7q_6 Forward Primer
gaaatttttgcagtaacagagcaa

SEQ ID NO: 7526 - DNA, 23 bp, Artificial Sequence
  Chr7q_6 Forward Primer
tcaaacattcaaattatgcctca

SEQ ID NO: 7527 - DNA, 20 bp, Artificial Sequence
  Chr7q_6 Forward Primer
ggttgctacctcttgggtga

SEQ ID NO: 7528 - DNA, 20 bp, Artificial Sequence
  Chr7q_6 Forward Primer
cctcacctgcagaatggaaa

SEQ ID NO: 7529 - DNA, 24 bp, Artificial Sequence
  Chr7q_6 Forward Primer
agtagtgcctactttcctatttgg

SEQ ID NO: 7530 - DNA, 20 bp, Artificial Sequence
  Chr7q_6 Forward Primer
tatcctctggcctaaaccca

SEQ ID NO: 7531 - DNA, 24 bp, Artificial Sequence
  Chr7q_6 Forward Primer
tcattaaacaatcacacacacaca

SEQ ID NO: 7532 - DNA, 20 bp, Artificial Sequence
  Chr7q_6 Forward Primer
ttacgacaccggtatatgcg

SEQ ID NO: 7533 - DNA, 22 bp, Artificial Sequence
  Chr7q_6 Forward Primer
ttcatcctgccaaaatattgaa

SEQ ID NO: 7534 - DNA, 20 bp, Artificial Sequence
  Chr7q_6 Forward Primer
caagcagcaacagagtttgc

SEQ ID NO: 7535 - DNA, 23 bp, Artificial Sequence
  Chr7q_6 Forward Primer
cttcattgtcccttgtcttgtaa

SEQ ID NO: 7536 - DNA, 20 bp, Artificial Sequence
  Chr7q_6 Forward Primer
cacgttagcacacgtctcca

SEQ ID NO: 7537 - DNA, 20 bp, Artificial Sequence
  Chr7q_6 Forward Primer
gtgcaaatgagccattcctt

SEQ ID NO: 7538 - DNA, 20 bp, Artificial Sequence
  Chr7q_6 Forward Primer
attctgggggctgataggac

SEQ ID NO: 7539 - DNA, 24 bp, Artificial Sequence
  Chr7q_6 Forward Primer
tctttttgcaatacaatcaggttt

SEQ ID NO: 7540 - DNA, 21 bp, Artificial Sequence
  Chr7q_6 Forward Primer
tgaagcatttgtcttggcttt

SEQ ID NO: 7541 - DNA, 20 bp, Artificial Sequence
  Chr7q_6 Forward Primer
atggaggcgtgagaaatcat

SEQ ID NO: 7542 - DNA, 21 bp, Artificial Sequence
  Chr7q_6 Forward Primer
tgtcgcaattctttttctgag

SEQ ID NO: 7543 - DNA, 25 bp, Artificial Sequence
  Chr7q_6 Forward Primer
ttgtcaataggagtataaattggca

SEQ ID NO: 7544 - DNA, 20 bp, Artificial Sequence
  Chr7q_6 Forward Primer
ttcgaagggaaaagaggaca

SEQ ID NO: 7545 - DNA, 22 bp, Artificial Sequence
  Chr7q_6 Forward Primer
cagcttgaatgaaggagtcaga

SEQ ID NO: 7546 - DNA, 23 bp, Artificial Sequence
  Chr7q_6 Forward Primer
ttgtgcagccataaatgaataga

SEQ ID NO: 7547 - DNA, 20 bp, Artificial Sequence
  Chr7q_6 Forward Primer
ttgcttctccctccctacct

SEQ ID NO: 7548 - DNA, 22 bp, Artificial Sequence
  Chr7q_6 Forward Primer
gcctatatgttctggcaatctg

SEQ ID NO: 7549 - DNA, 20 bp, Artificial Sequence
  Chr7q_6 Forward Primer
ttctctccgacaattccctg

SEQ ID NO: 7550 - DNA, 20 bp, Artificial Sequence
  Chr7q_6 Forward Primer
actaatgcctaagctccgca

SEQ ID NO: 7551 - DNA, 20 bp, Artificial Sequence
  Chr7q_6 Forward Primer
acctggaccagtcaagatgc

SEQ ID NO: 7552 - DNA, 20 bp, Artificial Sequence
  Chr7q_6 Forward Primer
tctcatccaaagctatgccc

SEQ ID NO: 7553 - DNA, 22 bp, Artificial Sequence
  Chr7q_6 Forward Primer
cttgggaaaatttgatctgtga

SEQ ID NO: 7554 - DNA, 20 bp, Artificial Sequence
  Chr7q_6 Forward Primer
gcataaaccacatccttccc

SEQ ID NO: 7555 - DNA, 20 bp, Artificial Sequence
  Chr7q_6 Forward Primer
tgttttgccattaggggttc

SEQ ID NO: 7556 - DNA, 20 bp, Artificial Sequence
  Chr7q_6 Forward Primer
atgtcttgatcctgccttgc

SEQ ID NO: 7557 - DNA, 20 bp, Artificial Sequence
  Chr7q_6 Forward Primer
tttccaaatctggcttggtg

SEQ ID NO: 7558 - DNA, 26 bp, Artificial Sequence
  Chr7q_6 Forward Primer
aactttagattctcagctccagtttc

SEQ ID NO: 7559 - DNA, 20 bp, Artificial Sequence
  Chr7q_6 Forward Primer
tttgggtaggcctcagagtg

SEQ ID NO: 7560 - DNA, 21 bp, Artificial Sequence
  Chr7q_6 Forward Primer
cctttccacctttccattttg

SEQ ID NO: 7561 - DNA, 22 bp, Artificial Sequence
  Chr7q_6 Forward Primer
tcctggtttcaagaactctcaa

SEQ ID NO: 7562 - DNA, 20 bp, Artificial Sequence
  Chr7q_6 Forward Primer
gttccctagagctggcactg

SEQ ID NO: 7563 - DNA, 20 bp, Artificial Sequence
  Chr7q_6 Forward Primer
gcacagaccctggaagagag

SEQ ID NO: 7564 - DNA, 20 bp, Artificial Sequence
  Chr7q_6 Forward Primer
tacacagcacaggggttttg

SEQ ID NO: 7565 - DNA, 24 bp, Artificial Sequence
  Chr7q_6 Forward Primer
aaaccacacagtatttggactcaa

SEQ ID NO: 7566 - DNA, 20 bp, Artificial Sequence
  Chr7q_6 Forward Primer
aatactaggcttgggggtgg

SEQ ID NO: 7567 - DNA, 20 bp, Artificial Sequence
  Chr7q_6 Forward Primer
aactggtttatcagctgggg

SEQ ID NO: 7568 - DNA, 20 bp, Artificial Sequence
  Chr7q_6 Forward Primer
ttccaccccaacagcttatc

SEQ ID NO: 7569 - DNA, 20 bp, Artificial Sequence
  Chr7q_6 Forward Primer
atgctagacatggggactgg

SEQ ID NO: 7570 - DNA, 20 bp, Artificial Sequence
  Chr7q_6 Forward Primer
gatgaagcaggatgcaaggt

SEQ ID NO: 7571 - DNA, 20 bp, Artificial Sequence
  Chr7q_6 Forward Primer
cctccctaccttcttccaca

SEQ ID NO: 7572 - DNA, 20 bp, Artificial Sequence
  Chr7q_6 Forward Primer
aaaaggatcgagagcacctg

SEQ ID NO: 7573 - DNA, 20 bp, Artificial Sequence
  Chr7q_6 Forward Primer
agacgtgaaactggaggcag

SEQ ID NO: 7574 - DNA, 20 bp, Artificial Sequence
  Chr7q_6 Forward Primer
acaggttggtggctagatgg

SEQ ID NO: 7575 - DNA, 20 bp, Artificial Sequence
  Chr7q_6 Forward Primer
ggagttctgggatgcaggta

SEQ ID NO: 7576 - DNA, 20 bp, Artificial Sequence
  Chr7q_6 Forward Primer
atgatgtggtgagccaaagc

SEQ ID NO: 7577 - DNA, 24 bp, Artificial Sequence
  Chr7q_6 Forward Primer
ttgcaatctaagtctcttgtctgg

SEQ ID NO: 7578 - DNA, 20 bp, Artificial Sequence
  Chr7q_6 Forward Primer
tgtaagttcttcttgccgcc

SEQ ID NO: 7579 - DNA, 20 bp, Artificial Sequence
  Chr7q_6 Forward Primer
cagaagccaaagggaaacag

SEQ ID NO: 7580 - DNA, 20 bp, Artificial Sequence
  Chr7q_6 Forward Primer
tcaatgaccaagcaccatgt

SEQ ID NO: 7581 - DNA, 20 bp, Artificial Sequence
  Chr7q_6 Forward Primer
cccaaggacccaaattgata

SEQ ID NO: 7582 - DNA, 21 bp, Artificial Sequence
  Chr7q_6 Forward Primer
tgcattttaccaagttttcca

SEQ ID NO: 7583 - DNA, 20 bp, Artificial Sequence
  Chr7q_6 Forward Primer
ggtatgtgaagggagccatc

SEQ ID NO: 7584 - DNA, 21 bp, Artificial Sequence
  Chr7q_6 Forward Primer
cgggagaaatgagagagacct

SEQ ID NO: 7585 - DNA, 22 bp, Artificial Sequence
  Chr7q_6 Forward Primer
gcctaacatttcaaatcactgc

SEQ ID NO: 7586 - DNA, 20 bp, Artificial Sequence
  Chr7q_6 Forward Primer
gggggagaacctcaaaactg

SEQ ID NO: 7587 - DNA, 20 bp, Artificial Sequence
  Chr7q_6 Forward Primer
atcaagctccgaacaccaaa

SEQ ID NO: 7588 - DNA, 20 bp, Artificial Sequence
  Chr7q_6 Forward Primer
tgaaaatgcgtaggatgcaa

SEQ ID NO: 7589 - DNA, 20 bp, Artificial Sequence
  Chr7q_6 Forward Primer
gcagcccactgctcattatt

SEQ ID NO: 7590 - DNA, 20 bp, Artificial Sequence
  Chr7q_6 Forward Primer
agctggtttaccactggagg

SEQ ID NO: 7591 - DNA, 22 bp, Artificial Sequence
  Chr7q_6 Forward Primer
tgaaaggacactggttctatgg

SEQ ID NO: 7592 - DNA, 20 bp, Artificial Sequence
  Chr7q_6 Forward Primer
attgtatctggccactgcct

SEQ ID NO: 7593 - DNA, 20 bp, Artificial Sequence
  Chr7q_6 Forward Primer
gagaaaaattgctggcttgc

SEQ ID NO: 7594 - DNA, 23 bp, Artificial Sequence
  Chr7q_6 Forward Primer
tttcgttagattgtcagtagggc

SEQ ID NO: 7595 - DNA, 20 bp, Artificial Sequence
  Chr7q_6 Forward Primer
cctgatttccagggtttgaa

SEQ ID NO: 7596 - DNA, 20 bp, Artificial Sequence
  Chr7q_6 Forward Primer
cccaatctgtgctgtcaaga

SEQ ID NO: 7597 - DNA, 19 bp, Artificial Sequence
  Chr7q_6 Forward Primer
tggccacagtatggaccac

SEQ ID NO: 7598 - DNA, 22 bp, Artificial Sequence
  Chr7q_6 Forward Primer
tgtgaatgtgacttagccttgc

SEQ ID NO: 7599 - DNA, 24 bp, Artificial Sequence
  Chr7q_6 Forward Primer
catttaatttgccctttactctcc

SEQ ID NO: 7600 - DNA, 22 bp, Artificial Sequence
  Chr7q_6 Forward Primer
tcatttacagctaaacccacca

SEQ ID NO: 7601 - DNA, 20 bp, Artificial Sequence
  Chr7q_6 Reverse Primer
ttagggcttcaaggcaaaga

SEQ ID NO: 7602 - DNA, 20 bp, Artificial Sequence
  Chr7q_6 Reverse Primer
gaatagtgcaggaacccagg

SEQ ID NO: 7603 - DNA, 20 bp, Artificial Sequence
  Chr7q_6 Reverse Primer
cgtctgctttcaccttccat

SEQ ID NO: 7604 - DNA, 25 bp, Artificial Sequence
  Chr7q_6 Reverse Primer
ttaatattttggggtaaagaaaaca

SEQ ID NO: 7605 - DNA, 20 bp, Artificial Sequence
  Chr7q_6 Reverse Primer
gcctcctcattaggtgatcc

SEQ ID NO: 7606 - DNA, 20 bp, Artificial Sequence
  Chr7q_6 Reverse Primer
agagggagagttggggaaaa

SEQ ID NO: 7607 - DNA, 20 bp, Artificial Sequence
  Chr7q_6 Reverse Primer
tatggtggctccaccttgtt

SEQ ID NO: 7608 - DNA, 20 bp, Artificial Sequence
  Chr7q_6 Reverse Primer
ggtcctttcacccaggactt

SEQ ID NO: 7609 - DNA, 27 bp, Artificial Sequence
  Chr7q_6 Reverse Primer
gagttacttattagtgccttgaacaca

SEQ ID NO: 7610 - DNA, 22 bp, Artificial Sequence
  Chr7q_6 Reverse Primer
aaccatcacatggctatttcaa

SEQ ID NO: 7611 - DNA, 20 bp, Artificial Sequence
  Chr7q_6 Reverse Primer
aaccttccctctttgcttca

SEQ ID NO: 7612 - DNA, 21 bp, Artificial Sequence
  Chr7q_6 Reverse Primer
tcttgcagaaagatggagcat

SEQ ID NO: 7613 - DNA, 21 bp, Artificial Sequence
  Chr7q_6 Reverse Primer
ccaaagctgatattccagtgc

SEQ ID NO: 7614 - DNA, 21 bp, Artificial Sequence
  Chr7q_6 Reverse Primer
gggtaagttgagggactcctg

SEQ ID NO: 7615 - DNA, 20 bp, Artificial Sequence
  Chr7q_6 Reverse Primer
ctgcctgtcacagaatggag

SEQ ID NO: 7616 - DNA, 24 bp, Artificial Sequence
  Chr7q_6 Reverse Primer
ttccatgcttaaatacttccatca

SEQ ID NO: 7617 - DNA, 20 bp, Artificial Sequence
  Chr7q_6 Reverse Primer
cccagtcagtcctcagtgct

SEQ ID NO: 7618 - DNA, 20 bp, Artificial Sequence
  Chr7q_6 Reverse Primer
ggacgcaactgtgagactga

SEQ ID NO: 7619 - DNA, 20 bp, Artificial Sequence
  Chr7q_6 Reverse Primer
gtttgtccgtctctggcaat

SEQ ID NO: 7620 - DNA, 25 bp, Artificial Sequence
  Chr7q_6 Reverse Primer
gcagctgtgtacagagtattgtctt

SEQ ID NO: 7621 - DNA, 21 bp, Artificial Sequence
  Chr7q_6 Reverse Primer
tcttgtggacaacagcaaaga

SEQ ID NO: 7622 - DNA, 20 bp, Artificial Sequence
  Chr7q_6 Reverse Primer
ggggagcattgtaacctttc

SEQ ID NO: 7623 - DNA, 20 bp, Artificial Sequence
  Chr7q_6 Reverse Primer
ccagcaccaggattgaaaac

SEQ ID NO: 7624 - DNA, 21 bp, Artificial Sequence
  Chr7q_6 Reverse Primer
ccaaatgtgatgtgctttgtt

SEQ ID NO: 7625 - DNA, 23 bp, Artificial Sequence
  Chr7q_6 Reverse Primer
aagcaagtgagaaaacagaagga

SEQ ID NO: 7626 - DNA, 21 bp, Artificial Sequence
  Chr7q_6 Reverse Primer
cacaactggaaagtttctggc

SEQ ID NO: 7627 - DNA, 21 bp, Artificial Sequence
  Chr7q_6 Reverse Primer
cagaatgaggctcaaaaacga

SEQ ID NO: 7628 - DNA, 20 bp, Artificial Sequence
  Chr7q_6 Reverse Primer
cctttgatgcttccattggt

SEQ ID NO: 7629 - DNA, 22 bp, Artificial Sequence
  Chr7q_6 Reverse Primer
gaagaacaattgggttagtggg

SEQ ID NO: 7630 - DNA, 20 bp, Artificial Sequence
  Chr7q_6 Reverse Primer
cgcagagtagaggggaaggt

SEQ ID NO: 7631 - DNA, 20 bp, Artificial Sequence
  Chr7q_6 Reverse Primer
tgcctaggaggcatgaagat

SEQ ID NO: 7632 - DNA, 20 bp, Artificial Sequence
  Chr7q_6 Reverse Primer
tgaaggaacaccactacccc

SEQ ID NO: 7633 - DNA, 20 bp, Artificial Sequence
  Chr7q_6 Reverse Primer
tttccaaactgactgcacca

SEQ ID NO: 7634 - DNA, 21 bp, Artificial Sequence
  Chr7q_6 Reverse Primer
ctgagccaccttctttctctg

SEQ ID NO: 7635 - DNA, 21 bp, Artificial Sequence
  Chr7q_6 Reverse Primer
agcaaaactcttggggtagag

SEQ ID NO: 7636 - DNA, 20 bp, Artificial Sequence
  Chr7q_6 Reverse Primer
aggcctcacagggagttaaa

SEQ ID NO: 7637 - DNA, 23 bp, Artificial Sequence
  Chr7q_6 Reverse Primer
cactttacttgggagtccatgtg

SEQ ID NO: 7638 - DNA, 20 bp, Artificial Sequence
  Chr7q_6 Reverse Primer
ttttggtttgttttggtggc

SEQ ID NO: 7639 - DNA, 24 bp, Artificial Sequence
  Chr7q_6 Reverse Primer
tggtttagtgttgcttattcttga

SEQ ID NO: 7640 - DNA, 20 bp, Artificial Sequence
  Chr7q_6 Reverse Primer
gggcaattggaggaccttat

SEQ ID NO: 7641 - DNA, 20 bp, Artificial Sequence
  Chr7q_6 Reverse Primer
tacctaggccccacttcaga

SEQ ID NO: 7642 - DNA, 21 bp, Artificial Sequence
  Chr7q_6 Reverse Primer
gcaaaaagagagtgcataggg

SEQ ID NO: 7643 - DNA, 21 bp, Artificial Sequence
  Chr7q_6 Reverse Primer
gaacgctctttctgtggatga

SEQ ID NO: 7644 - DNA, 20 bp, Artificial Sequence
  Chr7q_6 Reverse Primer
tgggttctgaattgtgcttg

SEQ ID NO: 7645 - DNA, 20 bp, Artificial Sequence
  Chr7q_6 Reverse Primer
ctgggccaggacttgattta

SEQ ID NO: 7646 - DNA, 21 bp, Artificial Sequence
  Chr7q_6 Reverse Primer
tctgaggctaccagacttcca

SEQ ID NO: 7647 - DNA, 20 bp, Artificial Sequence
  Chr7q_6 Reverse Primer
gggagaatacacacgctgct

SEQ ID NO: 7648 - DNA, 21 bp, Artificial Sequence
  Chr7q_6 Reverse Primer
caggataattcctgtgaggca

SEQ ID NO: 7649 - DNA, 25 bp, Artificial Sequence
  Chr7q_6 Reverse Primer
gcaaatatatgcagtatagcatgag

SEQ ID NO: 7650 - DNA, 24 bp, Artificial Sequence
  Chr7q_6 Reverse Primer
gcattatgctgaaaaatatctccc

SEQ ID NO: 7651 - DNA, 21 bp, Artificial Sequence
  Chr7q_6 Reverse Primer
ttgcctgatctgcaaattctt

SEQ ID NO: 7652 - DNA, 20 bp, Artificial Sequence
  Chr7q_6 Reverse Primer
cacagcccagcacagttaag

SEQ ID NO: 7653 - DNA, 20 bp, Artificial Sequence
  Chr7q_6 Reverse Primer
gaagcagtggcaaacacaga

SEQ ID NO: 7654 - DNA, 25 bp, Artificial Sequence
  Chr7q_6 Reverse Primer
ttcctaagtgatgagaattgaatga

SEQ ID NO: 7655 - DNA, 21 bp, Artificial Sequence
  Chr7q_6 Reverse Primer
ccatgcagatcaaaaggtgtt

SEQ ID NO: 7656 - DNA, 21 bp, Artificial Sequence
  Chr7q_6 Reverse Primer
tgggagaaatggagttagcaa

SEQ ID NO: 7657 - DNA, 21 bp, Artificial Sequence
  Chr7q_6 Reverse Primer
tgattgtatcactcggttccc

SEQ ID NO: 7658 - DNA, 20 bp, Artificial Sequence
  Chr7q_6 Reverse Primer
atcacagccaaagctttcaa

SEQ ID NO: 7659 - DNA, 20 bp, Artificial Sequence
  Chr7q_6 Reverse Primer
tagcttctgcggggagttag

SEQ ID NO: 7660 - DNA, 22 bp, Artificial Sequence
  Chr7q_6 Reverse Primer
ggccatttatttatttgatgcc

SEQ ID NO: 7661 - DNA, 21 bp, Artificial Sequence
  Chr7q_6 Reverse Primer
ccctgcaagtagacaaggtca

SEQ ID NO: 7662 - DNA, 20 bp, Artificial Sequence
  Chr7q_6 Reverse Primer
acagtgacttctggcctgct

SEQ ID NO: 7663 - DNA, 20 bp, Artificial Sequence
  Chr7q_6 Reverse Primer
ggaaagggagaggaaaccag

SEQ ID NO: 7664 - DNA, 21 bp, Artificial Sequence
  Chr7q_6 Reverse Primer
tccagagtcagttgatgacca

SEQ ID NO: 7665 - DNA, 20 bp, Artificial Sequence
  Chr7q_6 Reverse Primer
ctggaagcctctgagtgtcc

SEQ ID NO: 7666 - DNA, 25 bp, Artificial Sequence
  Chr7q_6 Reverse Primer
gaataagggacagaaatagtggttg

SEQ ID NO: 7667 - DNA, 21 bp, Artificial Sequence
  Chr7q_6 Reverse Primer
gctggtccacctactctagcc

SEQ ID NO: 7668 - DNA, 20 bp, Artificial Sequence
  Chr7q_6 Reverse Primer
gccaaagtggcctcactaaa

SEQ ID NO: 7669 - DNA, 20 bp, Artificial Sequence
  Chr7q_6 Reverse Primer
ccattgcctgtagggaaaaa

SEQ ID NO: 7670 - DNA, 20 bp, Artificial Sequence
  Chr7q_6 Reverse Primer
cactgctctttggatttccc

SEQ ID NO: 7671 - DNA, 20 bp, Artificial Sequence
  Chr7q_6 Reverse Primer
tcagctacgaagaaaagggg

SEQ ID NO: 7672 - DNA, 20 bp, Artificial Sequence
  Chr7q_6 Reverse Primer
gccatgaaggaaaagatgga

SEQ ID NO: 7673 - DNA, 20 bp, Artificial Sequence
  Chr7q_6 Reverse Primer
ggaaagctgctctgtgtgaa

SEQ ID NO: 7674 - DNA, 22 bp, Artificial Sequence
  Chr7q_6 Reverse Primer
aagtctctctgcttccatttcg

SEQ ID NO: 7675 - DNA, 20 bp, Artificial Sequence
  Chr7q_6 Reverse Primer
gacctcagcttcaacaaggc

SEQ ID NO: 7676 - DNA, 20 bp, Artificial Sequence
  Chr7q_6 Reverse Primer
ggagcagaggaaggaaaagg

SEQ ID NO: 7677 - DNA, 26 bp, Artificial Sequence
  Chr7q_6 Reverse Primer
tttttattgatagtaaccagggcttt

SEQ ID NO: 7678 - DNA, 20 bp, Artificial Sequence
  Chr7q_6 Reverse Primer
cgggcaaattaaacctgttc

SEQ ID NO: 7679 - DNA, 20 bp, Artificial Sequence
  Chr7q_6 Reverse Primer
ggagaggggaggtagcagtt

SEQ ID NO: 7680 - DNA, 20 bp, Artificial Sequence
  Chr7q_6 Reverse Primer
ccaagttgcttaagttgggg

SEQ ID NO: 7681 - DNA, 21 bp, Artificial Sequence
  Chr7q_6 Reverse Primer
caagtgtgccatctgaaaaca

SEQ ID NO: 7682 - DNA, 26 bp, Artificial Sequence
  Chr7q_6 Reverse Primer
tttttacttggctctgtcttagatta

SEQ ID NO: 7683 - DNA, 27 bp, Artificial Sequence
  Chr7q_6 Reverse Primer
gatgatatttcttcaattaacaagcaa

SEQ ID NO: 7684 - DNA, 22 bp, Artificial Sequence
  Chr7q_6 Reverse Primer
tttagtcatgaagaatgggcaa

SEQ ID NO: 7685 - DNA, 20 bp, Artificial Sequence
  Chr7q_6 Reverse Primer
ttgtggaagtgcaaggacag

SEQ ID NO: 7686 - DNA, 20 bp, Artificial Sequence
  Chr7q_6 Reverse Primer
gaagtgatagggtttgggca

SEQ ID NO: 7687 - DNA, 22 bp, Artificial Sequence
  Chr7q_6 Reverse Primer
tgccaagaatagatctgctcaa

SEQ ID NO: 7688 - DNA, 20 bp, Artificial Sequence
  Chr7q_6 Reverse Primer
gctggacagaccatgctgta

SEQ ID NO: 7689 - DNA, 24 bp, Artificial Sequence
  Chr7q_6 Reverse Primer
tgctctacccaaatttattattga

SEQ ID NO: 7690 - DNA, 21 bp, Artificial Sequence
  Chr7q_6 Reverse Primer
gctgctcctgtgtcttctgtt

SEQ ID NO: 7691 - DNA, 20 bp, Artificial Sequence
  Chr7q_6 Reverse Primer
ttgcttggttctctccagtt

SEQ ID NO: 7692 - DNA, 20 bp, Artificial Sequence
  Chr7q_6 Reverse Primer
tccaggagatggactcctta

SEQ ID NO: 7693 - DNA, 20 bp, Artificial Sequence
  Chr7q_6 Reverse Primer
caaagggtgtgcaggatttt

SEQ ID NO: 7694 - DNA, 26 bp, Artificial Sequence
  Chr7q_6 Reverse Primer
cagtcaagattctgtctcatatttcc

SEQ ID NO: 7695 - DNA, 21 bp, Artificial Sequence
  Chr7q_6 Reverse Primer
ggtgatgctgcagaacttttt

SEQ ID NO: 7696 - DNA, 21 bp, Artificial Sequence
  Chr7q_6 Reverse Primer
cggtgaatagaggacatggaa

SEQ ID NO: 7697 - DNA, 20 bp, Artificial Sequence
  Chr7q_7 Forward Primer
cactccacctgtgtcagcac

SEQ ID NO: 7698 - DNA, 20 bp, Artificial Sequence
  Chr7q_7 Forward Primer
ttatagctgtgctttggggg

SEQ ID NO: 7699 - DNA, 27 bp, Artificial Sequence
  Chr7q_7 Forward Primer
cacaactaattatctgaaagtgagaca

SEQ ID NO: 7700 - DNA, 20 bp, Artificial Sequence
  Chr7q_7 Forward Primer
gtggagttgtgtgccatgag

SEQ ID NO: 7701 - DNA, 20 bp, Artificial Sequence
  Chr7q_7 Forward Primer
ctgagatttccccctttttg

SEQ ID NO: 7702 - DNA, 23 bp, Artificial Sequence
  Chr7q_7 Forward Primer
gatttgtgttcaaattctggctc

SEQ ID NO: 7703 - DNA, 20 bp, Artificial Sequence
  Chr7q_7 Forward Primer
tgctttccactctcttccag

SEQ ID NO: 7704 - DNA, 26 bp, Artificial Sequence
  Chr7q_7 Forward Primer
tgtattaccctttgtcaacagatttc

SEQ ID NO: 7705 - DNA, 20 bp, Artificial Sequence
  Chr7q_7 Forward Primer
tgcacttctattgtttgccg

SEQ ID NO: 7706 - DNA, 22 bp, Artificial Sequence
  Chr7q_7 Forward Primer
gcggtagctgacaaatacagaa

SEQ ID NO: 7707 - DNA, 20 bp, Artificial Sequence
  Chr7q_7 Forward Primer
cctggctatctccacaaacc

SEQ ID NO: 7708 - DNA, 20 bp, Artificial Sequence
  Chr7q_7 Forward Primer
cctttactgtgccttcagca

SEQ ID NO: 7709 - DNA, 20 bp, Artificial Sequence
  Chr7q_7 Forward Primer
tgtaaagtaatggtgggggc

SEQ ID NO: 7710 - DNA, 20 bp, Artificial Sequence
  Chr7q_7 Forward Primer
acctcaggattgtgctgtca

SEQ ID NO: 7711 - DNA, 20 bp, Artificial Sequence
  Chr7q_7 Forward Primer
atcgatgctttggttgcact

SEQ ID NO: 7712 - DNA, 20 bp, Artificial Sequence
  Chr7q_7 Forward Primer
tggtataagctgcaaaggca

SEQ ID NO: 7713 - DNA, 20 bp, Artificial Sequence
  Chr7q_7 Forward Primer
tttttgccgtttattttgcc

SEQ ID NO: 7714 - DNA, 20 bp, Artificial Sequence
  Chr7q_7 Forward Primer
tatcaaacccagagtggcgt

SEQ ID NO: 7715 - DNA, 20 bp, Artificial Sequence
  Chr7q_7 Forward Primer
cttcagttttggggacctga

SEQ ID NO: 7716 - DNA, 21 bp, Artificial Sequence
  Chr7q_7 Forward Primer
cttctgttttgcttgtgtgga

SEQ ID NO: 7717 - DNA, 24 bp, Artificial Sequence
  Chr7q_7 Forward Primer
gaaagtactgaaaatatttgccca

SEQ ID NO: 7718 - DNA, 20 bp, Artificial Sequence
  Chr7q_7 Forward Primer
ctggatgggaaaacagtgct

SEQ ID NO: 7719 - DNA, 20 bp, Artificial Sequence
  Chr7q_7 Forward Primer
caagtgttccccatctgctt

SEQ ID NO: 7720 - DNA, 23 bp, Artificial Sequence
  Chr7q_7 Forward Primer
aaagctcctcttctcttgtctga

SEQ ID NO: 7721 - DNA, 20 bp, Artificial Sequence
  Chr7q_7 Forward Primer
ttaatcccttatcccagggc

SEQ ID NO: 7722 - DNA, 20 bp, Artificial Sequence
  Chr7q_7 Forward Primer
gaagagccaaacatcccaag

SEQ ID NO: 7723 - DNA, 21 bp, Artificial Sequence
  Chr7q_7 Forward Primer
tgctgaggtgctgatagaaca

SEQ ID NO: 7724 - DNA, 20 bp, Artificial Sequence
  Chr7q_7 Forward Primer
acccagcccatatttcatca

SEQ ID NO: 7725 - DNA, 20 bp, Artificial Sequence
  Chr7q_7 Forward Primer
acaatgaagccatcagggag

SEQ ID NO: 7726 - DNA, 20 bp, Artificial Sequence
  Chr7q_7 Forward Primer
tggatctgagtcttcctggg

SEQ ID NO: 7727 - DNA, 20 bp, Artificial Sequence
  Chr7q_7 Forward Primer
aggcttgccataaacaatgg

SEQ ID NO: 7728 - DNA, 20 bp, Artificial Sequence
  Chr7q_7 Forward Primer
aaggatgaagcaggctgaaa

SEQ ID NO: 7729 - DNA, 20 bp, Artificial Sequence
  Chr7q_7 Forward Primer
aagaatggtggtcccatttg

SEQ ID NO: 7730 - DNA, 20 bp, Artificial Sequence
  Chr7q_7 Forward Primer
ggaggctagacctcacatgg

SEQ ID NO: 7731 - DNA, 23 bp, Artificial Sequence
  Chr7q_7 Forward Primer
tgcctaatagttgtccctgagtc

SEQ ID NO: 7732 - DNA, 20 bp, Artificial Sequence
  Chr7q_7 Forward Primer
tggctgtgatgaggagtcag

SEQ ID NO: 7733 - DNA, 20 bp, Artificial Sequence
  Chr7q_7 Forward Primer
gcccaaaaggtatgctgaaa

SEQ ID NO: 7734 - DNA, 20 bp, Artificial Sequence
  Chr7q_7 Forward Primer
cttacaaccccctgcttcct

SEQ ID NO: 7735 - DNA, 20 bp, Artificial Sequence
  Chr7q_7 Forward Primer
tctgggatgacagattgcag

SEQ ID NO: 7736 - DNA, 21 bp, Artificial Sequence
  Chr7q_7 Forward Primer
catgtttctggaccgtatgtg

SEQ ID NO: 7737 - DNA, 20 bp, Artificial Sequence
  Chr7q_7 Forward Primer
aaagagatggctggaacgtg

SEQ ID NO: 7738 - DNA, 20 bp, Artificial Sequence
  Chr7q_7 Forward Primer
acccctttatttccacagcc

SEQ ID NO: 7739 - DNA, 20 bp, Artificial Sequence
  Chr7q_7 Forward Primer
ctcagtccagcgacctgtct

SEQ ID NO: 7740 - DNA, 20 bp, Artificial Sequence
  Chr7q_7 Forward Primer
gcactgggcattagcctaga

SEQ ID NO: 7741 - DNA, 23 bp, Artificial Sequence
  Chr7q_7 Forward Primer
tttggctgtacaccagtatgttc

SEQ ID NO: 7742 - DNA, 24 bp, Artificial Sequence
  Chr7q_7 Forward Primer
atttccttcttcaaattttgcttc

SEQ ID NO: 7743 - DNA, 22 bp, Artificial Sequence
  Chr7q_7 Forward Primer
gcattgtcacaggttatggatg

SEQ ID NO: 7744 - DNA, 20 bp, Artificial Sequence
  Chr7q_7 Forward Primer
aacactgctgttgtcttggg

SEQ ID NO: 7745 - DNA, 23 bp, Artificial Sequence
  Chr7q_7 Forward Primer
tctgagctttcttaaatgcaagg

SEQ ID NO: 7746 - DNA, 21 bp, Artificial Sequence
  Chr7q_7 Forward Primer
catctctcctccagcttttca

SEQ ID NO: 7747 - DNA, 23 bp, Artificial Sequence
  Chr7q_7 Forward Primer
ttttcctcactttttcttttccc

SEQ ID NO: 7748 - DNA, 20 bp, Artificial Sequence
  Chr7q_7 Forward Primer
tctggcttcctgaaacacat

SEQ ID NO: 7749 - DNA, 20 bp, Artificial Sequence
  Chr7q_7 Forward Primer
ccactgatgcaacacaaacc

SEQ ID NO: 7750 - DNA, 21 bp, Artificial Sequence
  Chr7q_7 Forward Primer
aaatgtgctttggttagcaga

SEQ ID NO: 7751 - DNA, 20 bp, Artificial Sequence
  Chr7q_7 Forward Primer
ccagctgaactgccttccta

SEQ ID NO: 7752 - DNA, 20 bp, Artificial Sequence
  Chr7q_7 Forward Primer
gaaatggtccctacagcagc

SEQ ID NO: 7753 - DNA, 20 bp, Artificial Sequence
  Chr7q_7 Forward Primer
caagaagggtcacaagccat

SEQ ID NO: 7754 - DNA, 20 bp, Artificial Sequence
  Chr7q_7 Forward Primer
ctttgtgttcactctgggca

SEQ ID NO: 7755 - DNA, 21 bp, Artificial Sequence
  Chr7q_7 Forward Primer
tggattgttaccttttctggg

SEQ ID NO: 7756 - DNA, 21 bp, Artificial Sequence
  Chr7q_7 Forward Primer
ggccagcgtctatagtaggaa

SEQ ID NO: 7757 - DNA, 27 bp, Artificial Sequence
  Chr7q_7 Forward Primer
tctagaaagtatccagagaatctcctt

SEQ ID NO: 7758 - DNA, 27 bp, Artificial Sequence
  Chr7q_7 Forward Primer
ttaagtgcataactttattgtgacagc

SEQ ID NO: 7759 - DNA, 20 bp, Artificial Sequence
  Chr7q_7 Forward Primer
ggggatgggactgctgtatt

SEQ ID NO: 7760 - DNA, 21 bp, Artificial Sequence
  Chr7q_7 Forward Primer
agctgagctaatggttgtcca

SEQ ID NO: 7761 - DNA, 20 bp, Artificial Sequence
  Chr7q_7 Forward Primer
aagcacctctattccagcca

SEQ ID NO: 7762 - DNA, 20 bp, Artificial Sequence
  Chr7q_7 Forward Primer
tgttgcctttatggagcaca

SEQ ID NO: 7763 - DNA, 20 bp, Artificial Sequence
  Chr7q_7 Forward Primer
ctctgagctcatttttgggc

SEQ ID NO: 7764 - DNA, 20 bp, Artificial Sequence
  Chr7q_7 Forward Primer
tggaatggaagaccactgaa

SEQ ID NO: 7765 - DNA, 20 bp, Artificial Sequence
  Chr7q_7 Forward Primer
gtcagtctgatgagaggccc

SEQ ID NO: 7766 - DNA, 20 bp, Artificial Sequence
  Chr7q_7 Forward Primer
cccattatccttgagaggca

SEQ ID NO: 7767 - DNA, 20 bp, Artificial Sequence
  Chr7q_7 Forward Primer
tagtggggttgacagaaggg

SEQ ID NO: 7768 - DNA, 20 bp, Artificial Sequence
  Chr7q_7 Forward Primer
gtcactccagggacacaggt

SEQ ID NO: 7769 - DNA, 18 bp, Artificial Sequence
  Chr7q_7 Forward Primer
gccctgtgaagggcaata

SEQ ID NO: 7770 - DNA, 20 bp, Artificial Sequence
  Chr7q_7 Forward Primer
tggcttgctttatggtgtga

SEQ ID NO: 7771 - DNA, 20 bp, Artificial Sequence
  Chr7q_7 Forward Primer
tgtgagctgttcagccattg

SEQ ID NO: 7772 - DNA, 23 bp, Artificial Sequence
  Chr7q_7 Forward Primer
gaaattgaggaatgatgagaaaa

SEQ ID NO: 7773 - DNA, 20 bp, Artificial Sequence
  Chr7q_7 Forward Primer
ccagcagtgcagttcatttg

SEQ ID NO: 7774 - DNA, 21 bp, Artificial Sequence
  Chr7q_7 Forward Primer
cacacacaccatcaccttcag

SEQ ID NO: 7775 - DNA, 20 bp, Artificial Sequence
  Chr7q_7 Forward Primer
aggctgaactggtccttgaa

SEQ ID NO: 7776 - DNA, 22 bp, Artificial Sequence
  Chr7q_7 Forward Primer
ggtatgtaacacagttcctggc

SEQ ID NO: 7777 - DNA, 20 bp, Artificial Sequence
  Chr7q_7 Forward Primer
ttgggtcttttccaagatgc

SEQ ID NO: 7778 - DNA, 20 bp, Artificial Sequence
  Chr7q_7 Forward Primer
gacaggcatcatggcttttt

SEQ ID NO: 7779 - DNA, 23 bp, Artificial Sequence
  Chr7q_7 Forward Primer
aaaacacacggcatcttttagag

SEQ ID NO: 7780 - DNA, 20 bp, Artificial Sequence
  Chr7q_7 Forward Primer
caaagctataagcccctccc

SEQ ID NO: 7781 - DNA, 20 bp, Artificial Sequence
  Chr7q_7 Forward Primer
atggaaagcctttgggagtt

SEQ ID NO: 7782 - DNA, 20 bp, Artificial Sequence
  Chr7q_7 Forward Primer
ctggtagcaggttgtgggat

SEQ ID NO: 7783 - DNA, 20 bp, Artificial Sequence
  Chr7q_7 Forward Primer
cacattttgatcccaggtga

SEQ ID NO: 7784 - DNA, 20 bp, Artificial Sequence
  Chr7q_7 Forward Primer
gagagcaggagcaagggtta

SEQ ID NO: 7785 - DNA, 21 bp, Artificial Sequence
  Chr7q_7 Forward Primer
gggaagaaggaagaaggagaa

SEQ ID NO: 7786 - DNA, 22 bp, Artificial Sequence
  Chr7q_7 Forward Primer
tccaagtgattcctatgtgcag

SEQ ID NO: 7787 - DNA, 20 bp, Artificial Sequence
  Chr7q_7 Forward Primer
gaaaaggggagaaagcaatg

SEQ ID NO: 7788 - DNA, 24 bp, Artificial Sequence
  Chr7q_7 Forward Primer
tggaaaattcagtgattatggttg

SEQ ID NO: 7789 - DNA, 21 bp, Artificial Sequence
  Chr7q_7 Forward Primer
aaaggcacttgtgagaaaccc

SEQ ID NO: 7790 - DNA, 21 bp, Artificial Sequence
  Chr7q_7 Forward Primer
tccctcaaatgagcaatcttt

SEQ ID NO: 7791 - DNA, 20 bp, Artificial Sequence
  Chr7q_7 Forward Primer
cccctaatcccatttccttc

SEQ ID NO: 7792 - DNA, 22 bp, Artificial Sequence
  Chr7q_7 Forward Primer
gggctttctttgctaagagcta

SEQ ID NO: 7793 - DNA, 20 bp, Artificial Sequence
  Chr7q_7 Reverse Primer
gaaggcaagaatttggcaag

SEQ ID NO: 7794 - DNA, 23 bp, Artificial Sequence
  Chr7q_7 Reverse Primer
caaatttattgccttccacaatc

SEQ ID NO: 7795 - DNA, 20 bp, Artificial Sequence
  Chr7q_7 Reverse Primer
tggctctaaaaacaacgcct

SEQ ID NO: 7796 - DNA, 20 bp, Artificial Sequence
  Chr7q_7 Reverse Primer
tctgctccctggaatgagtt

SEQ ID NO: 7797 - DNA, 25 bp, Artificial Sequence
  Chr7q_7 Reverse Primer
tttatattctcccattctcaactcc

SEQ ID NO: 7798 - DNA, 20 bp, Artificial Sequence
  Chr7q_7 Reverse Primer
aagaaggtccaatgaacccc

SEQ ID NO: 7799 - DNA, 22 bp, Artificial Sequence
  Chr7q_7 Reverse Primer
ctctggtgtttcaagtccatgt

SEQ ID NO: 7800 - DNA, 24 bp, Artificial Sequence
  Chr7q_7 Reverse Primer
cgcttatggaataacaagatctca

SEQ ID NO: 7801 - DNA, 20 bp, Artificial Sequence
  Chr7q_7 Reverse Primer
cacctcaaaattcagcagca

SEQ ID NO: 7802 - DNA, 20 bp, Artificial Sequence
  Chr7q_7 Reverse Primer
ccagcactcttcttcccatc

SEQ ID NO: 7803 - DNA, 19 bp, Artificial Sequence
  Chr7q_7 Reverse Primer
ggcctcctccagattcctt

SEQ ID NO: 7804 - DNA, 20 bp, Artificial Sequence
  Chr7q_7 Reverse Primer
aacaaccttctttttccccc

SEQ ID NO: 7805 - DNA, 20 bp, Artificial Sequence
  Chr7q_7 Reverse Primer
agtccggcacacaagcttta

SEQ ID NO: 7806 - DNA, 23 bp, Artificial Sequence
  Chr7q_7 Reverse Primer
aaaatcagattcctagatggtgc

SEQ ID NO: 7807 - DNA, 20 bp, Artificial Sequence
  Chr7q_7 Reverse Primer
acctacccccaaaaagcaag

SEQ ID NO: 7808 - DNA, 20 bp, Artificial Sequence
  Chr7q_7 Reverse Primer
gcagcctggaccactaagaa

SEQ ID NO: 7809 - DNA, 19 bp, Artificial Sequence
  Chr7q_7 Reverse Primer
tcaaattctttccccctgc

SEQ ID NO: 7810 - DNA, 20 bp, Artificial Sequence
  Chr7q_7 Reverse Primer
tgccaaatgaagaggaaagg

SEQ ID NO: 7811 - DNA, 20 bp, Artificial Sequence
  Chr7q_7 Reverse Primer
aaagggggagggtatgaaga

SEQ ID NO: 7812 - DNA, 20 bp, Artificial Sequence
  Chr7q_7 Reverse Primer
ctcccatcctcacacactcc

SEQ ID NO: 7813 - DNA, 20 bp, Artificial Sequence
  Chr7q_7 Reverse Primer
cacagggagcttacagtcca

SEQ ID NO: 7814 - DNA, 20 bp, Artificial Sequence
  Chr7q_7 Reverse Primer
gatgatgggaagcagaggag

SEQ ID NO: 7815 - DNA, 20 bp, Artificial Sequence
  Chr7q_7 Reverse Primer
taccaaaaagcgggacaaag

SEQ ID NO: 7816 - DNA, 21 bp, Artificial Sequence
  Chr7q_7 Reverse Primer
aattcctcttggggaaaatga

SEQ ID NO: 7817 - DNA, 20 bp, Artificial Sequence
  Chr7q_7 Reverse Primer
attggaggcaacagaaagga

SEQ ID NO: 7818 - DNA, 20 bp, Artificial Sequence
  Chr7q_7 Reverse Primer
gcactgcaagatcaggaaca

SEQ ID NO: 7819 - DNA, 20 bp, Artificial Sequence
  Chr7q_7 Reverse Primer
gaaaccaaaaccgaggttca

SEQ ID NO: 7820 - DNA, 20 bp, Artificial Sequence
  Chr7q_7 Reverse Primer
tggtcccaagtaaccatgtg

SEQ ID NO: 7821 - DNA, 20 bp, Artificial Sequence
  Chr7q_7 Reverse Primer
gggagagggttgccagtaag

SEQ ID NO: 7822 - DNA, 23 bp, Artificial Sequence
  Chr7q_7 Reverse Primer
ctgatgaccaactgtagcatgag

SEQ ID NO: 7823 - DNA, 20 bp, Artificial Sequence
  Chr7q_7 Reverse Primer
cctcacttcacgctaggctt

SEQ ID NO: 7824 - DNA, 20 bp, Artificial Sequence
  Chr7q_7 Reverse Primer
cccacctcctccataactca

SEQ ID NO: 7825 - DNA, 20 bp, Artificial Sequence
  Chr7q_7 Reverse Primer
gtcctgcagagaggcacttt

SEQ ID NO: 7826 - DNA, 20 bp, Artificial Sequence
  Chr7q_7 Reverse Primer
ccaaggctatccagttgctc

SEQ ID NO: 7827 - DNA, 20 bp, Artificial Sequence
  Chr7q_7 Reverse Primer
actcacaccacccactgatg

SEQ ID NO: 7828 - DNA, 20 bp, Artificial Sequence
  Chr7q_7 Reverse Primer
cctcatctgggcatcatctt

SEQ ID NO: 7829 - DNA, 20 bp, Artificial Sequence
  Chr7q_7 Reverse Primer
catttgctggtctccttggt

SEQ ID NO: 7830 - DNA, 20 bp, Artificial Sequence
  Chr7q_7 Reverse Primer
caacccaaatgccatctctt

SEQ ID NO: 7831 - DNA, 20 bp, Artificial Sequence
  Chr7q_7 Reverse Primer
atcatattcatgcccccaaa

SEQ ID NO: 7832 - DNA, 26 bp, Artificial Sequence
  Chr7q_7 Reverse Primer
tttactaagaaagatttcagggactc

SEQ ID NO: 7833 - DNA, 20 bp, Artificial Sequence
  Chr7q_7 Reverse Primer
gacgctggcatatgaatcaa

SEQ ID NO: 7834 - DNA, 20 bp, Artificial Sequence
  Chr7q_7 Reverse Primer
agacagccctgcgttaaaaa

SEQ ID NO: 7835 - DNA, 20 bp, Artificial Sequence
  Chr7q_7 Reverse Primer
gagatccagtccatggcttc

SEQ ID NO: 7836 - DNA, 20 bp, Artificial Sequence
  Chr7q_7 Reverse Primer
aaagctgccaaagcaaactg

SEQ ID NO: 7837 - DNA, 21 bp, Artificial Sequence
  Chr7q_7 Reverse Primer
gagcacttgcctggtagactc

SEQ ID NO: 7838 - DNA, 21 bp, Artificial Sequence
  Chr7q_7 Reverse Primer
tccctgggataaaggattctg

SEQ ID NO: 7839 - DNA, 22 bp, Artificial Sequence
  Chr7q_7 Reverse Primer
tttgggacaatattccatgaca

SEQ ID NO: 7840 - DNA, 18 bp, Artificial Sequence
  Chr7q_7 Reverse Primer
actggtggggtttcccag

SEQ ID NO: 7841 - DNA, 20 bp, Artificial Sequence
  Chr7q_7 Reverse Primer
agtttaccgcattttccagg

SEQ ID NO: 7842 - DNA, 20 bp, Artificial Sequence
  Chr7q_7 Reverse Primer
ggggacaagggaaagagaag

SEQ ID NO: 7843 - DNA, 20 bp, Artificial Sequence
  Chr7q_7 Reverse Primer
aacaaggagttgagctggca

SEQ ID NO: 7844 - DNA, 20 bp, Artificial Sequence
  Chr7q_7 Reverse Primer
actcaccatcccacctgaac

SEQ ID NO: 7845 - DNA, 20 bp, Artificial Sequence
  Chr7q_7 Reverse Primer
tacccaacacgatctctccc

SEQ ID NO: 7846 - DNA, 20 bp, Artificial Sequence
  Chr7q_7 Reverse Primer
tatgcctggggatgagagag

SEQ ID NO: 7847 - DNA, 20 bp, Artificial Sequence
  Chr7q_7 Reverse Primer
agcaaggcaacaggtttctc

SEQ ID NO: 7848 - DNA, 20 bp, Artificial Sequence
  Chr7q_7 Reverse Primer
catgtgggagacttcctggt

SEQ ID NO: 7849 - DNA, 20 bp, Artificial Sequence
  Chr7q_7 Reverse Primer
gtcaggggctctcaacaatc

SEQ ID NO: 7850 - DNA, 20 bp, Artificial Sequence
  Chr7q_7 Reverse Primer
tacagactggcagagggagg

SEQ ID NO: 7851 - DNA, 20 bp, Artificial Sequence
  Chr7q_7 Reverse Primer
cactgggccttactgtgaga

SEQ ID NO: 7852 - DNA, 22 bp, Artificial Sequence
  Chr7q_7 Reverse Primer
aaatgattacagatctgcgtgc

SEQ ID NO: 7853 - DNA, 27 bp, Artificial Sequence
  Chr7q_7 Reverse Primer
aaaacagaagtaattaaccaagagacg

SEQ ID NO: 7854 - DNA, 20 bp, Artificial Sequence
  Chr7q_7 Reverse Primer
ttgtcttgaaatgccagtgc

SEQ ID NO: 7855 - DNA, 21 bp, Artificial Sequence
  Chr7q_7 Reverse Primer
gaacagctttcaaagaagcct

SEQ ID NO: 7856 - DNA, 20 bp, Artificial Sequence
  Chr7q_7 Reverse Primer
agacatggcaagagttgcac

SEQ ID NO: 7857 - DNA, 20 bp, Artificial Sequence
  Chr7q_7 Reverse Primer
ttttgttgaccttggtgcag

SEQ ID NO: 7858 - DNA, 20 bp, Artificial Sequence
  Chr7q_7 Reverse Primer
aggggagtttgcagagttca

SEQ ID NO: 7859 - DNA, 21 bp, Artificial Sequence
  Chr7q_7 Reverse Primer
tggcctattcctgtaatttcc

SEQ ID NO: 7860 - DNA, 20 bp, Artificial Sequence
  Chr7q_7 Reverse Primer
gccatgtcatttcccttcac

SEQ ID NO: 7861 - DNA, 20 bp, Artificial Sequence
  Chr7q_7 Reverse Primer
gccctttcaagatcaacagc

SEQ ID NO: 7862 - DNA, 20 bp, Artificial Sequence
  Chr7q_7 Reverse Primer
tggccacagaactaaccaaa

SEQ ID NO: 7863 - DNA, 20 bp, Artificial Sequence
  Chr7q_7 Reverse Primer
ttctccagcttcagaggagc

SEQ ID NO: 7864 - DNA, 20 bp, Artificial Sequence
  Chr7q_7 Reverse Primer
tctctggtgtcccctcagac

SEQ ID NO: 7865 - DNA, 20 bp, Artificial Sequence
  Chr7q_7 Reverse Primer
gacagcaacagtagccaggg

SEQ ID NO: 7866 - DNA, 20 bp, Artificial Sequence
  Chr7q_7 Reverse Primer
ccacagccaggagatggata

SEQ ID NO: 7867 - DNA, 20 bp, Artificial Sequence
  Chr7q_7 Reverse Primer
ccatcaaacagcccaattct

SEQ ID NO: 7868 - DNA, 20 bp, Artificial Sequence
  Chr7q_7 Reverse Primer
ttcttttgcattggctttcc

SEQ ID NO: 7869 - DNA, 22 bp, Artificial Sequence
  Chr7q_7 Reverse Primer
cgacagcttggttaaacaaaaa

SEQ ID NO: 7870 - DNA, 20 bp, Artificial Sequence
  Chr7q_7 Reverse Primer
ccaacacgacttgagcagaa

SEQ ID NO: 7871 - DNA, 20 bp, Artificial Sequence
  Chr7q_7 Reverse Primer
gcaccagaatgcagagacaa

SEQ ID NO: 7872 - DNA, 20 bp, Artificial Sequence
  Chr7q_7 Reverse Primer
tggctaagacccagcatttt

SEQ ID NO: 7873 - DNA, 20 bp, Artificial Sequence
  Chr7q_7 Reverse Primer
aagatgctccaaacagcagc

SEQ ID NO: 7874 - DNA, 23 bp, Artificial Sequence
  Chr7q_7 Reverse Primer
tcactttagatcaatgccagaca

SEQ ID NO: 7875 - DNA, 20 bp, Artificial Sequence
  Chr7q_7 Reverse Primer
ttccccttggtcttacgatg

SEQ ID NO: 7876 - DNA, 21 bp, Artificial Sequence
  Chr7q_7 Reverse Primer
gctgtacatcaggtaccaggg

SEQ ID NO: 7877 - DNA, 21 bp, Artificial Sequence
  Chr7q_7 Reverse Primer
tctgacaagtccttcaatggc

SEQ ID NO: 7878 - DNA, 20 bp, Artificial Sequence
  Chr7q_7 Reverse Primer
ctccaaatcacctgccaaat

SEQ ID NO: 7879 - DNA, 20 bp, Artificial Sequence
  Chr7q_7 Reverse Primer
tgtctgggttctcacatcca

SEQ ID NO: 7880 - DNA, 22 bp, Artificial Sequence
  Chr7q_7 Reverse Primer
tccaggcttctgctaatactca

SEQ ID NO: 7881 - DNA, 20 bp, Artificial Sequence
  Chr7q_7 Reverse Primer
tgcctcagaacctcagttcc

SEQ ID NO: 7882 - DNA, 21 bp, Artificial Sequence
  Chr7q_7 Reverse Primer
tctcagtctccttgattccga

SEQ ID NO: 7883 - DNA, 23 bp, Artificial Sequence
  Chr7q_7 Reverse Primer
ttttggatctcatggtattctga

SEQ ID NO: 7884 - DNA, 26 bp, Artificial Sequence
  Chr7q_7 Reverse Primer
tctagcatatagactcacatggagaa

SEQ ID NO: 7885 - DNA, 24 bp, Artificial Sequence
  Chr7q_7 Reverse Primer
aattaagaatgcatgaaaaatggg

SEQ ID NO: 7886 - DNA, 20 bp, Artificial Sequence
  Chr7q_7 Reverse Primer
gcaagaagagacaaccgacc

SEQ ID NO: 7887 - DNA, 20 bp, Artificial Sequence
  Chr7q_7 Reverse Primer
aggtaagcctggaaagggag

SEQ ID NO: 7888 - DNA, 20 bp, Artificial Sequence
  Chr7q_7 Reverse Primer
agcagatgcctgctcaatta

SEQ ID NO: 7889 - DNA, 21 bp, Artificial Sequence
  Chr7q_8 Forward Primer
aaagaatgcagagtttgctgc

SEQ ID NO: 7890 - DNA, 21 bp, Artificial Sequence
  Chr7q_8 Forward Primer
tcagaaaggccataattgcag

SEQ ID NO: 7891 - DNA, 20 bp, Artificial Sequence
  Chr7q_8 Forward Primer
acagtatgggggcagtatgg

SEQ ID NO: 7892 - DNA, 20 bp, Artificial Sequence
  Chr7q_8 Forward Primer
aatgcttggcaaagaggatg

SEQ ID NO: 7893 - DNA, 20 bp, Artificial Sequence
  Chr7q_8 Forward Primer
agtgagcatcactacgggct

SEQ ID NO: 7894 - DNA, 20 bp, Artificial Sequence
  Chr7q_8 Forward Primer
aagtcaagaggatggttggc

SEQ ID NO: 7895 - DNA, 20 bp, Artificial Sequence
  Chr7q_8 Forward Primer
cagatgccaatacagcagga

SEQ ID NO: 7896 - DNA, 20 bp, Artificial Sequence
  Chr7q_8 Forward Primer
tggagccccacgtcttatag

SEQ ID NO: 7897 - DNA, 20 bp, Artificial Sequence
  Chr7q_8 Forward Primer
tcagttcttgcatgttccca

SEQ ID NO: 7898 - DNA, 20 bp, Artificial Sequence
  Chr7q_8 Forward Primer
gcactgacctgtgctcttca

SEQ ID NO: 7899 - DNA, 20 bp, Artificial Sequence
  Chr7q_8 Forward Primer
gccagctgaggtagaggaga

SEQ ID NO: 7900 - DNA, 20 bp, Artificial Sequence
  Chr7q_8 Forward Primer
atgccccttttcttgtcctt

SEQ ID NO: 7901 - DNA, 20 bp, Artificial Sequence
  Chr7q_8 Forward Primer
ctggaacaggggatgtgatt

SEQ ID NO: 7902 - DNA, 20 bp, Artificial Sequence
  Chr7q_8 Forward Primer
ctcccacgacctcctcataa

SEQ ID NO: 7903 - DNA, 20 bp, Artificial Sequence
  Chr7q_8 Forward Primer
gaatcccctgcctctctctg

SEQ ID NO: 7904 - DNA, 20 bp, Artificial Sequence
  Chr7q_8 Forward Primer
catgtgcactcctgcaatct

SEQ ID NO: 7905 - DNA, 20 bp, Artificial Sequence
  Chr7q_8 Forward Primer
atcagggctcagagcagcta

SEQ ID NO: 7906 - DNA, 20 bp, Artificial Sequence
  Chr7q_8 Forward Primer
tacccaaggtttttctcccc

SEQ ID NO: 7907 - DNA, 20 bp, Artificial Sequence
  Chr7q_8 Forward Primer
ccaagagagatgctgaagcc

SEQ ID NO: 7908 - DNA, 20 bp, Artificial Sequence
  Chr7q_8 Forward Primer
agaaggaaggtgtgtggtgg

SEQ ID NO: 7909 - DNA, 20 bp, Artificial Sequence
  Chr7q_8 Forward Primer
ggagctccttgcagaagaca

SEQ ID NO: 7910 - DNA, 20 bp, Artificial Sequence
  Chr7q_8 Forward Primer
acaggaagaggtgatgtggg

SEQ ID NO: 7911 - DNA, 20 bp, Artificial Sequence
  Chr7q_8 Forward Primer
agtatgaacttgatggcggg

SEQ ID NO: 7912 - DNA, 19 bp, Artificial Sequence
  Chr7q_8 Forward Primer
ggcgtgaggaaagaaggag

SEQ ID NO: 7913 - DNA, 20 bp, Artificial Sequence
  Chr7q_8 Forward Primer
caccatcctggaaggaagaa

SEQ ID NO: 7914 - DNA, 20 bp, Artificial Sequence
  Chr7q_8 Forward Primer
acaggggtgaataaggggag

SEQ ID NO: 7915 - DNA, 20 bp, Artificial Sequence
  Chr7q_8 Forward Primer
agaaagaaccacatccgtgc

SEQ ID NO: 7916 - DNA, 20 bp, Artificial Sequence
  Chr7q_8 Forward Primer
ggcgtgaagaactgagatcc

SEQ ID NO: 7917 - DNA, 20 bp, Artificial Sequence
  Chr7q_8 Forward Primer
ttccaggagaggactggaag

SEQ ID NO: 7918 - DNA, 20 bp, Artificial Sequence
  Chr7q_8 Forward Primer
tctcgtggggaaagtgactc

SEQ ID NO: 7919 - DNA, 20 bp, Artificial Sequence
  Chr7q_8 Forward Primer
caaatgcaggcccaagatag

SEQ ID NO: 7920 - DNA, 20 bp, Artificial Sequence
  Chr7q_8 Forward Primer
gacagcacagagaactggca

SEQ ID NO: 7921 - DNA, 20 bp, Artificial Sequence
  Chr7q_8 Forward Primer
tgtatgtccccagagaaggg

SEQ ID NO: 7922 - DNA, 20 bp, Artificial Sequence
  Chr7q_8 Forward Primer
ccccaccctacatgtttgtc

SEQ ID NO: 7923 - DNA, 20 bp, Artificial Sequence
  Chr7q_8 Forward Primer
ttcaggtttggatagtcccg

SEQ ID NO: 7924 - DNA, 20 bp, Artificial Sequence
  Chr7q_8 Forward Primer
ctgaggtcggagtaggcatc

SEQ ID NO: 7925 - DNA, 20 bp, Artificial Sequence
  Chr7q_8 Forward Primer
aagggtgaataggtcagggg

SEQ ID NO: 7926 - DNA, 20 bp, Artificial Sequence
  Chr7q_8 Forward Primer
gaggaggttcatggtttcca

SEQ ID NO: 7927 - DNA, 20 bp, Artificial Sequence
  Chr7q_8 Forward Primer
gagagaggaaagggaatggg

SEQ ID NO: 7928 - DNA, 20 bp, Artificial Sequence
  Chr7q_8 Forward Primer
tggtgctgtccatgttgatt

SEQ ID NO: 7929 - DNA, 20 bp, Artificial Sequence
  Chr7q_8 Forward Primer
ttatgtggaggggtcagagg

SEQ ID NO: 7930 - DNA, 20 bp, Artificial Sequence
  Chr7q_8 Forward Primer
gagaaaccaagggtgagctg

SEQ ID NO: 7931 - DNA, 18 bp, Artificial Sequence
  Chr7q_8 Forward Primer
agctcctggtggagggag

SEQ ID NO: 7932 - DNA, 20 bp, Artificial Sequence
  Chr7q_8 Forward Primer
gaggaggcattcagcacatc

SEQ ID NO: 7933 - DNA, 20 bp, Artificial Sequence
  Chr7q_8 Forward Primer
tgtgagagacggagagctga

SEQ ID NO: 7934 - DNA, 20 bp, Artificial Sequence
  Chr7q_8 Forward Primer
cagaagctggagggagaaga

SEQ ID NO: 7935 - DNA, 18 bp, Artificial Sequence
  Chr7q_8 Forward Primer
aaagcacccgagccagat

SEQ ID NO: 7936 - DNA, 18 bp, Artificial Sequence
  Chr7q_8 Forward Primer
ggaggcgcaagacgagag

SEQ ID NO: 7937 - DNA, 20 bp, Artificial Sequence
  Chr7q_8 Forward Primer
cgaggttctggttgatggat

SEQ ID NO: 7938 - DNA, 20 bp, Artificial Sequence
  Chr7q_8 Forward Primer
gtccacttctctgtgctcgc

SEQ ID NO: 7939 - DNA, 20 bp, Artificial Sequence
  Chr7q_8 Forward Primer
ccgaagcagcaaagagagag

SEQ ID NO: 7940 - DNA, 20 bp, Artificial Sequence
  Chr7q_8 Forward Primer
cagagagagaaggcaatggg

SEQ ID NO: 7941 - DNA, 20 bp, Artificial Sequence
  Chr7q_8 Forward Primer
ccagtcgcaaaggaaagaag

SEQ ID NO: 7942 - DNA, 20 bp, Artificial Sequence
  Chr7q_8 Forward Primer
aaacctctccccttggtctc

SEQ ID NO: 7943 - DNA, 20 bp, Artificial Sequence
  Chr7q_8 Forward Primer
ttaaggccattgtcccagtc

SEQ ID NO: 7944 - DNA, 20 bp, Artificial Sequence
  Chr7q_8 Forward Primer
agcttcacactgatccccac

SEQ ID NO: 7945 - DNA, 20 bp, Artificial Sequence
  Chr7q_8 Forward Primer
cccatctgacggcatctact

SEQ ID NO: 7946 - DNA, 20 bp, Artificial Sequence
  Chr7q_8 Forward Primer
gcacctagcctgaggtctgt

SEQ ID NO: 7947 - DNA, 20 bp, Artificial Sequence
  Chr7q_8 Forward Primer
ccagctggtttcccagagta

SEQ ID NO: 7948 - DNA, 20 bp, Artificial Sequence
  Chr7q_8 Forward Primer
atgcccagacaactgcttct

SEQ ID NO: 7949 - DNA, 20 bp, Artificial Sequence
  Chr7q_8 Forward Primer
aagcacacacagcacctcag

SEQ ID NO: 7950 - DNA, 20 bp, Artificial Sequence
  Chr7q_8 Forward Primer
gcagttgtttgttccagcct

SEQ ID NO: 7951 - DNA, 20 bp, Artificial Sequence
  Chr7q_8 Forward Primer
gagagagctcctgccttgtg

SEQ ID NO: 7952 - DNA, 20 bp, Artificial Sequence
  Chr7q_8 Forward Primer
ttggacggagatctgtttca

SEQ ID NO: 7953 - DNA, 22 bp, Artificial Sequence
  Chr7q_8 Forward Primer
ttccacagacaaggaaaattca

SEQ ID NO: 7954 - DNA, 20 bp, Artificial Sequence
  Chr7q_8 Forward Primer
gttcagaccaccgtttggtt

SEQ ID NO: 7955 - DNA, 20 bp, Artificial Sequence
  Chr7q_8 Forward Primer
atgcatgaggtggctagtgg

SEQ ID NO: 7956 - DNA, 20 bp, Artificial Sequence
  Chr7q_8 Forward Primer
aaactggatggtcatgggag

SEQ ID NO: 7957 - DNA, 20 bp, Artificial Sequence
  Chr7q_8 Forward Primer
ggatggaaaaacgagactgg

SEQ ID NO: 7958 - DNA, 20 bp, Artificial Sequence
  Chr7q_8 Forward Primer
tgtccaggaaatgtgagctg

SEQ ID NO: 7959 - DNA, 20 bp, Artificial Sequence
  Chr7q_8 Forward Primer
ttttaggaaggagggaggga

SEQ ID NO: 7960 - DNA, 21 bp, Artificial Sequence
  Chr7q_8 Forward Primer
tccataagtgacattctgggg

SEQ ID NO: 7961 - DNA, 20 bp, Artificial Sequence
  Chr7q_8 Forward Primer
cctccctcttccacctaacc

SEQ ID NO: 7962 - DNA, 20 bp, Artificial Sequence
  Chr7q_8 Forward Primer
gtaccaaccagaagctggga

SEQ ID NO: 7963 - DNA, 20 bp, Artificial Sequence
  Chr7q_8 Forward Primer
attcccaagtctcttcacgc

SEQ ID NO: 7964 - DNA, 20 bp, Artificial Sequence
  Chr7q_8 Forward Primer
gttcagatctctgcttgggc

SEQ ID NO: 7965 - DNA, 20 bp, Artificial Sequence
  Chr7q_8 Forward Primer
tcgtgatgcaatgaaagtcc

SEQ ID NO: 7966 - DNA, 20 bp, Artificial Sequence
  Chr7q_8 Forward Primer
tctgggggtggcataaataa

SEQ ID NO: 7967 - DNA, 20 bp, Artificial Sequence
  Chr7q_8 Forward Primer
tgggtgcacagagaatgaag

SEQ ID NO: 7968 - DNA, 20 bp, Artificial Sequence
  Chr7q_8 Forward Primer
gattctggttccctggtcct

SEQ ID NO: 7969 - DNA, 20 bp, Artificial Sequence
  Chr7q_8 Forward Primer
tgttggctgaactgaggttg

SEQ ID NO: 7970 - DNA, 20 bp, Artificial Sequence
  Chr7q_8 Forward Primer
ggaggtgctccaatatcagg

SEQ ID NO: 7971 - DNA, 20 bp, Artificial Sequence
  Chr7q_8 Forward Primer
ttgatggaccaggtaggagg

SEQ ID NO: 7972 - DNA, 20 bp, Artificial Sequence
  Chr7q_8 Forward Primer
tctcagcgtgtgctgctatt

SEQ ID NO: 7973 - DNA, 21 bp, Artificial Sequence
  Chr7q_8 Forward Primer
ggttataaatccttggaggcg

SEQ ID NO: 7974 - DNA, 20 bp, Artificial Sequence
  Chr7q_8 Forward Primer
ttgagacatcttgggcagtg

SEQ ID NO: 7975 - DNA, 26 bp, Artificial Sequence
  Chr7q_8 Forward Primer
gggtagatagcttttattcctatgag

SEQ ID NO: 7976 - DNA, 20 bp, Artificial Sequence
  Chr7q_8 Forward Primer
gcctgtggctgtgagaaata

SEQ ID NO: 7977 - DNA, 20 bp, Artificial Sequence
  Chr7q_8 Forward Primer
gggcagaactggaatttgaa

SEQ ID NO: 7978 - DNA, 20 bp, Artificial Sequence
  Chr7q_8 Forward Primer
aggcaaccagatctgacacc

SEQ ID NO: 7979 - DNA, 20 bp, Artificial Sequence
  Chr7q_8 Forward Primer
gagaaaatgaagcgcctacg

SEQ ID NO: 7980 - DNA, 20 bp, Artificial Sequence
  Chr7q_8 Forward Primer
gaagggccgtaaaagacgag

SEQ ID NO: 7981 - DNA, 19 bp, Artificial Sequence
  Chr7q_8 Forward Primer
agcccagctccatacgttc

SEQ ID NO: 7982 - DNA, 21 bp, Artificial Sequence
  Chr7q_8 Forward Primer
tcaggaaatgacatcagaggc

SEQ ID NO: 7983 - DNA, 18 bp, Artificial Sequence
  Chr7q_8 Forward Primer
gagtgggggtcaccaagg

SEQ ID NO: 7984 - DNA, 20 bp, Artificial Sequence
  Chr7q_8 Forward Primer
gaatttggggatgtctggaa

SEQ ID NO: 7985 - DNA, 20 bp, Artificial Sequence
  Chr7q_8 Reverse Primer
ggtggggaaggtttctcttc

SEQ ID NO: 7986 - DNA, 20 bp, Artificial Sequence
  Chr7q_8 Reverse Primer
tccctgggaaagacataagc

SEQ ID NO: 7987 - DNA, 20 bp, Artificial Sequence
  Chr7q_8 Reverse Primer
gtacatctccagcttttgcg

SEQ ID NO: 7988 - DNA, 21 bp, Artificial Sequence
  Chr7q_8 Reverse Primer
gatggatgaccacttagcagg

SEQ ID NO: 7989 - DNA, 20 bp, Artificial Sequence
  Chr7q_8 Reverse Primer
ccaaaattcccaagagtcca

SEQ ID NO: 7990 - DNA, 22 bp, Artificial Sequence
  Chr7q_8 Reverse Primer
ttgagtgttatgtggtatcggc

SEQ ID NO: 7991 - DNA, 20 bp, Artificial Sequence
  Chr7q_8 Reverse Primer
gctcttcaaacatgccttcc

SEQ ID NO: 7992 - DNA, 20 bp, Artificial Sequence
  Chr7q_8 Reverse Primer
gacctcctccttcttcccag

SEQ ID NO: 7993 - DNA, 20 bp, Artificial Sequence
  Chr7q_8 Reverse Primer
ctggaagggagactggtcaa

SEQ ID NO: 7994 - DNA, 20 bp, Artificial Sequence
  Chr7q_8 Reverse Primer
tgaggggacttctgagatgc

SEQ ID NO: 7995 - DNA, 20 bp, Artificial Sequence
  Chr7q_8 Reverse Primer
ccttcctagtgaccacctgc

SEQ ID NO: 7996 - DNA, 20 bp, Artificial Sequence
  Chr7q_8 Reverse Primer
gctgaagagcagtgggaaag

SEQ ID NO: 7997 - DNA, 20 bp, Artificial Sequence
  Chr7q_8 Reverse Primer
tcctcatcctcctcgtctgt

SEQ ID NO: 7998 - DNA, 20 bp, Artificial Sequence
  Chr7q_8 Reverse Primer
ggaatggggagaacagtcaa

SEQ ID NO: 7999 - DNA, 20 bp, Artificial Sequence
  Chr7q_8 Reverse Primer
ctggtctggaggcacattct

SEQ ID NO: 8000 - DNA, 20 bp, Artificial Sequence
  Chr7q_8 Reverse Primer
agggcacttgtgtcttttgc

SEQ ID NO: 8001 - DNA, 20 bp, Artificial Sequence
  Chr7q_8 Reverse Primer
gcacgctaatggagtgcata

SEQ ID NO: 8002 - DNA, 20 bp, Artificial Sequence
  Chr7q_8 Reverse Primer
atgtgatgctggagaaggct

SEQ ID NO: 8003 - DNA, 20 bp, Artificial Sequence
  Chr7q_8 Reverse Primer
tcctccaggtctgggaaata

SEQ ID NO: 8004 - DNA, 20 bp, Artificial Sequence
  Chr7q_8 Reverse Primer
tttcctttggggttaaggct

SEQ ID NO: 8005 - DNA, 20 bp, Artificial Sequence
  Chr7q_8 Reverse Primer
cgggggagttaggaaaggta

SEQ ID NO: 8006 - DNA, 20 bp, Artificial Sequence
  Chr7q_8 Reverse Primer
gctaacgtgtgctgactcca

SEQ ID NO: 8007 - DNA, 20 bp, Artificial Sequence
  Chr7q_8 Reverse Primer
gcctgtgtcctacccacact

SEQ ID NO: 8008 - DNA, 19 bp, Artificial Sequence
  Chr7q_8 Reverse Primer
gtggggactgagcagcata

SEQ ID NO: 8009 - DNA, 20 bp, Artificial Sequence
  Chr7q_8 Reverse Primer
agtggagtggagggaggagt

SEQ ID NO: 8010 - DNA, 20 bp, Artificial Sequence
  Chr7q_8 Reverse Primer
tcccatggctaaaaggaaga

SEQ ID NO: 8011 - DNA, 20 bp, Artificial Sequence
  Chr7q_8 Reverse Primer
cccagctcatccctactgag

SEQ ID NO: 8012 - DNA, 20 bp, Artificial Sequence
  Chr7q_8 Reverse Primer
gaggaccaggatgggatttt

SEQ ID NO: 8013 - DNA, 20 bp, Artificial Sequence
  Chr7q_8 Reverse Primer
ctctcagccggaaggtgtct

SEQ ID NO: 8014 - DNA, 20 bp, Artificial Sequence
  Chr7q_8 Reverse Primer
cttgcatgaaatgggacctt

SEQ ID NO: 8015 - DNA, 20 bp, Artificial Sequence
  Chr7q_8 Reverse Primer
gtcattcctgcccttgacat

SEQ ID NO: 8016 - DNA, 20 bp, Artificial Sequence
  Chr7q_8 Reverse Primer
tgggctgcaactacagtgac

SEQ ID NO: 8017 - DNA, 20 bp, Artificial Sequence
  Chr7q_8 Reverse Primer
ctcttgggggttctctgttg

SEQ ID NO: 8018 - DNA, 20 bp, Artificial Sequence
  Chr7q_8 Reverse Primer
gggaggcctacagaagaggt

SEQ ID NO: 8019 - DNA, 20 bp, Artificial Sequence
  Chr7q_8 Reverse Primer
tgtggcaggattagctccat

SEQ ID NO: 8020 - DNA, 20 bp, Artificial Sequence
  Chr7q_8 Reverse Primer
ttctggaggatgtgggaaat

SEQ ID NO: 8021 - DNA, 20 bp, Artificial Sequence
  Chr7q_8 Reverse Primer
acaccacttccattcttccg

SEQ ID NO: 8022 - DNA, 20 bp, Artificial Sequence
  Chr7q_8 Reverse Primer
cctcctcctcatcttctccc

SEQ ID NO: 8023 - DNA, 20 bp, Artificial Sequence
  Chr7q_8 Reverse Primer
gcaacaacccaaacactcct

SEQ ID NO: 8024 - DNA, 20 bp, Artificial Sequence
  Chr7q_8 Reverse Primer
gaatttggagagtgcaggga

SEQ ID NO: 8025 - DNA, 20 bp, Artificial Sequence
  Chr7q_8 Reverse Primer
gactcttaggaagggcccac

SEQ ID NO: 8026 - DNA, 20 bp, Artificial Sequence
  Chr7q_8 Reverse Primer
agtcctgcagtttcccactc

SEQ ID NO: 8027 - DNA, 19 bp, Artificial Sequence
  Chr7q_8 Reverse Primer
ctccccttcccaaaaatgg

SEQ ID NO: 8028 - DNA, 20 bp, Artificial Sequence
  Chr7q_8 Reverse Primer
gtctcccttctcctcaggct

SEQ ID NO: 8029 - DNA, 20 bp, Artificial Sequence
  Chr7q_8 Reverse Primer
aatttctcccgcctacacct

SEQ ID NO: 8030 - DNA, 18 bp, Artificial Sequence
  Chr7q_8 Reverse Primer
ggaggagatgggggcttc

SEQ ID NO: 8031 - DNA, 20 bp, Artificial Sequence
  Chr7q_8 Reverse Primer
cctcctctcctctgcctctc

SEQ ID NO: 8032 - DNA, 18 bp, Artificial Sequence
  Chr7q_8 Reverse Primer
ccggactgtgggtgggta

SEQ ID NO: 8033 - DNA, 20 bp, Artificial Sequence
  Chr7q_8 Reverse Primer
tagcgcactcgaaacaacag

SEQ ID NO: 8034 - DNA, 20 bp, Artificial Sequence
  Chr7q_8 Reverse Primer
tccgagaagatcacgtctca

SEQ ID NO: 8035 - DNA, 20 bp, Artificial Sequence
  Chr7q_8 Reverse Primer
ctttgggctttctgggtaca

SEQ ID NO: 8036 - DNA, 20 bp, Artificial Sequence
  Chr7q_8 Reverse Primer
gcacatacaccgaagatgga

SEQ ID NO: 8037 - DNA, 20 bp, Artificial Sequence
  Chr7q_8 Reverse Primer
cagggagagccataaggaga

SEQ ID NO: 8038 - DNA, 20 bp, Artificial Sequence
  Chr7q_8 Reverse Primer
atagggagcaggaaggaagc

SEQ ID NO: 8039 - DNA, 22 bp, Artificial Sequence
  Chr7q_8 Reverse Primer
ggtaccaccgaagtacctacaa

SEQ ID NO: 8040 - DNA, 20 bp, Artificial Sequence
  Chr7q_8 Reverse Primer
catccctccaggtggtttta

SEQ ID NO: 8041 - DNA, 20 bp, Artificial Sequence
  Chr7q_8 Reverse Primer
atcagccccagttctctcaa

SEQ ID NO: 8042 - DNA, 22 bp, Artificial Sequence
  Chr7q_8 Reverse Primer
ggacagattctatggccacttc

SEQ ID NO: 8043 - DNA, 20 bp, Artificial Sequence
  Chr7q_8 Reverse Primer
tcctgtgctggtctctttca

SEQ ID NO: 8044 - DNA, 20 bp, Artificial Sequence
  Chr7q_8 Reverse Primer
gctgacattcttccaggctc

SEQ ID NO: 8045 - DNA, 20 bp, Artificial Sequence
  Chr7q_8 Reverse Primer
ttgtcagtgctctgggattg

SEQ ID NO: 8046 - DNA, 20 bp, Artificial Sequence
  Chr7q_8 Reverse Primer
acaggtgagggctaaagggt

SEQ ID NO: 8047 - DNA, 20 bp, Artificial Sequence
  Chr7q_8 Reverse Primer
ttgcaggatatcccaaaagc

SEQ ID NO: 8048 - DNA, 20 bp, Artificial Sequence
  Chr7q_8 Reverse Primer
accactctttcactgtcggg

SEQ ID NO: 8049 - DNA, 21 bp, Artificial Sequence
  Chr7q_8 Reverse Primer
tgagcttatttcaacagggct

SEQ ID NO: 8050 - DNA, 20 bp, Artificial Sequence
  Chr7q_8 Reverse Primer
agagaaacacccagcacctg

SEQ ID NO: 8051 - DNA, 20 bp, Artificial Sequence
  Chr7q_8 Reverse Primer
aatggagaagatgagtgccg

SEQ ID NO: 8052 - DNA, 20 bp, Artificial Sequence
  Chr7q_8 Reverse Primer
aatcattttgcctcagccac

SEQ ID NO: 8053 - DNA, 20 bp, Artificial Sequence
  Chr7q_8 Reverse Primer
ctttctcaccctgtggtgct

SEQ ID NO: 8054 - DNA, 20 bp, Artificial Sequence
  Chr7q_8 Reverse Primer
attgcaggtgctcaaaggtt

SEQ ID NO: 8055 - DNA, 20 bp, Artificial Sequence
  Chr7q_8 Reverse Primer
tcagagcatgtaggcccttt

SEQ ID NO: 8056 - DNA, 20 bp, Artificial Sequence
  Chr7q_8 Reverse Primer
cactcagatgcaaggcacat

SEQ ID NO: 8057 - DNA, 20 bp, Artificial Sequence
  Chr7q_8 Reverse Primer
tgggcagtaggatatccagg

SEQ ID NO: 8058 - DNA, 20 bp, Artificial Sequence
  Chr7q_8 Reverse Primer
agagtcacaggagaggccaa

SEQ ID NO: 8059 - DNA, 20 bp, Artificial Sequence
  Chr7q_8 Reverse Primer
cactagagaccccaaggcag

SEQ ID NO: 8060 - DNA, 20 bp, Artificial Sequence
  Chr7q_8 Reverse Primer
atgatctcagcccttggtga

SEQ ID NO: 8061 - DNA, 20 bp, Artificial Sequence
  Chr7q_8 Reverse Primer
gaagacagtcgtgccattca

SEQ ID NO: 8062 - DNA, 20 bp, Artificial Sequence
  Chr7q_8 Reverse Primer
aacccatcttgcttgaggtg

SEQ ID NO: 8063 - DNA, 20 bp, Artificial Sequence
  Chr7q_8 Reverse Primer
aagcatcagcagccagaaat

SEQ ID NO: 8064 - DNA, 20 bp, Artificial Sequence
  Chr7q_8 Reverse Primer
agaaactctccatctggggg

SEQ ID NO: 8065 - DNA, 20 bp, Artificial Sequence
  Chr7q_8 Reverse Primer
cacacagcaagacccagaga

SEQ ID NO: 8066 - DNA, 20 bp, Artificial Sequence
  Chr7q_8 Reverse Primer
aggaatgcgactgtgtgtca

SEQ ID NO: 8067 - DNA, 20 bp, Artificial Sequence
  Chr7q_8 Reverse Primer
tcgccccttctaatcatcac

SEQ ID NO: 8068 - DNA, 20 bp, Artificial Sequence
  Chr7q_8 Reverse Primer
gcagtcagggaaggaaaatg

SEQ ID NO: 8069 - DNA, 20 bp, Artificial Sequence
  Chr7q_8 Reverse Primer
cttaacgattgctgggcatt

SEQ ID NO: 8070 - DNA, 20 bp, Artificial Sequence
  Chr7q_8 Reverse Primer
tgcgcgtgcaaaatagagta

SEQ ID NO: 8071 - DNA, 20 bp, Artificial Sequence
  Chr7q_8 Reverse Primer
cacctctctgacacgctcaa

SEQ ID NO: 8072 - DNA, 20 bp, Artificial Sequence
  Chr7q_8 Reverse Primer
gttttcccccatatgtccct

SEQ ID NO: 8073 - DNA, 20 bp, Artificial Sequence
  Chr7q_8 Reverse Primer
gggcaggatagagcagagtg

SEQ ID NO: 8074 - DNA, 20 bp, Artificial Sequence
  Chr7q_8 Reverse Primer
ctgaggccttcgtcttgttc

SEQ ID NO: 8075 - DNA, 20 bp, Artificial Sequence
  Chr7q_8 Reverse Primer
gactggatttctcagcctgc

SEQ ID NO: 8076 - DNA, 20 bp, Artificial Sequence
  Chr7q_8 Reverse Primer
cttggggatacgaacttcca

SEQ ID NO: 8077 - DNA, 20 bp, Artificial Sequence
  Chr7q_8 Reverse Primer
gagatctgactcaccgtccc

SEQ ID NO: 8078 - DNA, 19 bp, Artificial Sequence
  Chr7q_8 Reverse Primer
agaccatacaaggagcggc

SEQ ID NO: 8079 - DNA, 20 bp, Artificial Sequence
  Chr7q_8 Reverse Primer
agggattcactttgggcttt

SEQ ID NO: 8080 - DNA, 20 bp, Artificial Sequence
  Chr7q_8 Reverse Primer
tacacttcggaaaacggacc

SEQ ID NO: 8081 - DNA, 20 bp, Artificial Sequence
  Chr7q_9 Forward Primer
gcatgactggcctagggata

SEQ ID NO: 8082 - DNA, 20 bp, Artificial Sequence
  Chr7q_9 Forward Primer
gaaaaggagggagggaagtg

SEQ ID NO: 8083 - DNA, 20 bp, Artificial Sequence
  Chr7q_9 Forward Primer
agctggaacgtcagaaagga

SEQ ID NO: 8084 - DNA, 21 bp, Artificial Sequence
  Chr7q_9 Forward Primer
aactggagcctctacacagca

SEQ ID NO: 8085 - DNA, 24 bp, Artificial Sequence
  Chr7q_9 Forward Primer
tttgtgtgataagttcctgagtcc

SEQ ID NO: 8086 - DNA, 20 bp, Artificial Sequence
  Chr7q_9 Forward Primer
tttttctccagccactacgg

SEQ ID NO: 8087 - DNA, 20 bp, Artificial Sequence
  Chr7q_9 Forward Primer
gttgctcctccctcaacaag

SEQ ID NO: 8088 - DNA, 21 bp, Artificial Sequence
  Chr7q_9 Forward Primer
tcggatacagtgaaatggtga

SEQ ID NO: 8089 - DNA, 20 bp, Artificial Sequence
  Chr7q_9 Forward Primer
tgatatttggggatttggga

SEQ ID NO: 8090 - DNA, 20 bp, Artificial Sequence
  Chr7q_9 Forward Primer
tgaggaagatagcaaagccc

SEQ ID NO: 8091 - DNA, 20 bp, Artificial Sequence
  Chr7q_9 Forward Primer
ggaattggcctgtttgtcat

SEQ ID NO: 8092 - DNA, 20 bp, Artificial Sequence
  Chr7q_9 Forward Primer
cagctaccttttgggctctg

SEQ ID NO: 8093 - DNA, 20 bp, Artificial Sequence
  Chr7q_9 Forward Primer
ccgctctttgatttactggc

SEQ ID NO: 8094 - DNA, 25 bp, Artificial Sequence
  Chr7q_9 Forward Primer
ggaagtgcttctataaagaaagtgg

SEQ ID NO: 8095 - DNA, 20 bp, Artificial Sequence
  Chr7q_9 Forward Primer
cgatggcgtctttggtaagt

SEQ ID NO: 8096 - DNA, 20 bp, Artificial Sequence
  Chr7q_9 Forward Primer
ctggcttcaattcaaggagc

SEQ ID NO: 8097 - DNA, 20 bp, Artificial Sequence
  Chr7q_9 Forward Primer
gacacaagtagacgtccgca

SEQ ID NO: 8098 - DNA, 20 bp, Artificial Sequence
  Chr7q_9 Forward Primer
gcattgccacagacacactt

SEQ ID NO: 8099 - DNA, 20 bp, Artificial Sequence
  Chr7q_9 Forward Primer
cacccacctgaagtcagaca

SEQ ID NO: 8100 - DNA, 20 bp, Artificial Sequence
  Chr7q_9 Forward Primer
gagtggagaaccctcagcag

SEQ ID NO: 8101 - DNA, 21 bp, Artificial Sequence
  Chr7q_9 Forward Primer
tcattagggatctcctccaaa

SEQ ID NO: 8102 - DNA, 23 bp, Artificial Sequence
  Chr7q_9 Forward Primer
ttgtctttcctttttcccttttt

SEQ ID NO: 8103 - DNA, 20 bp, Artificial Sequence
  Chr7q_9 Forward Primer
agaatttcccaaacctgcct

SEQ ID NO: 8104 - DNA, 21 bp, Artificial Sequence
  Chr7q_9 Forward Primer
tgtcctaggtggtttttctcg

SEQ ID NO: 8105 - DNA, 20 bp, Artificial Sequence
  Chr7q_9 Forward Primer
gacgtgggttctgggaaata

SEQ ID NO: 8106 - DNA, 20 bp, Artificial Sequence
  Chr7q_9 Forward Primer
cagaaagtctgaaggggcag

SEQ ID NO: 8107 - DNA, 20 bp, Artificial Sequence
  Chr7q_9 Forward Primer
ctcgtctagtccttcccacg

SEQ ID NO: 8108 - DNA, 20 bp, Artificial Sequence
  Chr7q_9 Forward Primer
aggggataccaactggaagg

SEQ ID NO: 8109 - DNA, 20 bp, Artificial Sequence
  Chr7q_9 Forward Primer
tcctcctcccatctatgtcg

SEQ ID NO: 8110 - DNA, 21 bp, Artificial Sequence
  Chr7q_9 Forward Primer
acatgtgtttcctcctcctcc

SEQ ID NO: 8111 - DNA, 20 bp, Artificial Sequence
  Chr7q_9 Forward Primer
tttgtggtaagaaccctcgg

SEQ ID NO: 8112 - DNA, 20 bp, Artificial Sequence
  Chr7q_9 Forward Primer
ccctcttctgggactcttcc

SEQ ID NO: 8113 - DNA, 20 bp, Artificial Sequence
  Chr7q_9 Forward Primer
gcccatttcctcacctgtaa

SEQ ID NO: 8114 - DNA, 21 bp, Artificial Sequence
  Chr7q_9 Forward Primer
tcttcagaaggccttgatgtc

SEQ ID NO: 8115 - DNA, 20 bp, Artificial Sequence
  Chr7q_9 Forward Primer
cctcaactcagctgctgtca

SEQ ID NO: 8116 - DNA, 26 bp, Artificial Sequence
  Chr7q_9 Forward Primer
gaagcataatgaatcaataaacagtg

SEQ ID NO: 8117 - DNA, 20 bp, Artificial Sequence
  Chr7q_9 Forward Primer
ctagctccatggaatggtcc

SEQ ID NO: 8118 - DNA, 20 bp, Artificial Sequence
  Chr7q_9 Forward Primer
ttgttcaaccccagaacaca

SEQ ID NO: 8119 - DNA, 20 bp, Artificial Sequence
  Chr7q_9 Forward Primer
tgcgttctttgttctcttgg

SEQ ID NO: 8120 - DNA, 22 bp, Artificial Sequence
  Chr7q_9 Forward Primer
tgaagttggatgaccttgagaa

SEQ ID NO: 8121 - DNA, 20 bp, Artificial Sequence
  Chr7q_9 Forward Primer
tcacttacgggcccatactc

SEQ ID NO: 8122 - DNA, 20 bp, Artificial Sequence
  Chr7q_9 Forward Primer
cactgctctgtgaagaccca

SEQ ID NO: 8123 - DNA, 20 bp, Artificial Sequence
  Chr7q_9 Forward Primer
cgggctggtaatgagagaag

SEQ ID NO: 8124 - DNA, 20 bp, Artificial Sequence
  Chr7q_9 Forward Primer
cccccaaattcattcttgac

SEQ ID NO: 8125 - DNA, 20 bp, Artificial Sequence
  Chr7q_9 Forward Primer
ggcctggagtagatgactgc

SEQ ID NO: 8126 - DNA, 20 bp, Artificial Sequence
  Chr7q_9 Forward Primer
taccaaggcaagaaggttgg

SEQ ID NO: 8127 - DNA, 20 bp, Artificial Sequence
  Chr7q_9 Forward Primer
gaagaccactggctgctagg

SEQ ID NO: 8128 - DNA, 20 bp, Artificial Sequence
  Chr7q_9 Forward Primer
cgaagtcaaggatgcagaca

SEQ ID NO: 8129 - DNA, 20 bp, Artificial Sequence
  Chr7q_9 Forward Primer
aggtttagtgcacccagcag

SEQ ID NO: 8130 - DNA, 20 bp, Artificial Sequence
  Chr7q_9 Forward Primer
agtcctcccacccttcagat

SEQ ID NO: 8131 - DNA, 21 bp, Artificial Sequence
  Chr7q_9 Forward Primer
ttgatgtactggtgggtttcc

SEQ ID NO: 8132 - DNA, 20 bp, Artificial Sequence
  Chr7q_9 Forward Primer
gttgactgtgggctttggat

SEQ ID NO: 8133 - DNA, 20 bp, Artificial Sequence
  Chr7q_9 Forward Primer
cctgggaagtgctgattagg

SEQ ID NO: 8134 - DNA, 20 bp, Artificial Sequence
  Chr7q_9 Forward Primer
tccctgttctcttcttccca

SEQ ID NO: 8135 - DNA, 20 bp, Artificial Sequence
  Chr7q_9 Forward Primer
aaccacactgaatgcctttg

SEQ ID NO: 8136 - DNA, 20 bp, Artificial Sequence
  Chr7q_9 Forward Primer
tttgacatcccttttgcctc

SEQ ID NO: 8137 - DNA, 20 bp, Artificial Sequence
  Chr7q_9 Forward Primer
gaaaaggcttaatggacggg

SEQ ID NO: 8138 - DNA, 20 bp, Artificial Sequence
  Chr7q_9 Forward Primer
atgtctgggcacttcgtttc

SEQ ID NO: 8139 - DNA, 19 bp, Artificial Sequence
  Chr7q_9 Forward Primer
acctggagcctgctgttct

SEQ ID NO: 8140 - DNA, 20 bp, Artificial Sequence
  Chr7q_9 Forward Primer
taattttgcaaaccatgccc

SEQ ID NO: 8141 - DNA, 20 bp, Artificial Sequence
  Chr7q_9 Forward Primer
aagttttccctggccgtaat

SEQ ID NO: 8142 - DNA, 20 bp, Artificial Sequence
  Chr7q_9 Forward Primer
tgcagatgtccaggtgattc

SEQ ID NO: 8143 - DNA, 20 bp, Artificial Sequence
  Chr7q_9 Forward Primer
gcacacgctaagcactcaaa

SEQ ID NO: 8144 - DNA, 19 bp, Artificial Sequence
  Chr7q_9 Forward Primer
tctgggaactggggagact

SEQ ID NO: 8145 - DNA, 20 bp, Artificial Sequence
  Chr7q_9 Forward Primer
ttttccatgtaggcagacca

SEQ ID NO: 8146 - DNA, 20 bp, Artificial Sequence
  Chr7q_9 Forward Primer
cccttccaaagctctgagtg

SEQ ID NO: 8147 - DNA, 20 bp, Artificial Sequence
  Chr7q_9 Forward Primer
gagtcctgggtgatggaatg

SEQ ID NO: 8148 - DNA, 20 bp, Artificial Sequence
  Chr7q_9 Forward Primer
tggccatatctctgctgtca

SEQ ID NO: 8149 - DNA, 20 bp, Artificial Sequence
  Chr7q_9 Forward Primer
cagggtttcttggaccttga

SEQ ID NO: 8150 - DNA, 20 bp, Artificial Sequence
  Chr7q_9 Forward Primer
gaaatgacaagacctgggga

SEQ ID NO: 8151 - DNA, 20 bp, Artificial Sequence
  Chr7q_9 Forward Primer
gcatcaacaaagcccaaaat

SEQ ID NO: 8152 - DNA, 22 bp, Artificial Sequence
  Chr7q_9 Forward Primer
gaccgaagagcctattatttgc

SEQ ID NO: 8153 - DNA, 20 bp, Artificial Sequence
  Chr7q_9 Forward Primer
cttgtgcagagggagaaagg

SEQ ID NO: 8154 - DNA, 20 bp, Artificial Sequence
  Chr7q_9 Forward Primer
aggctccaggacttcagaaa

SEQ ID NO: 8155 - DNA, 20 bp, Artificial Sequence
  Chr7q_9 Forward Primer
tacaatggatgtggcaggag

SEQ ID NO: 8156 - DNA, 20 bp, Artificial Sequence
  Chr7q_9 Forward Primer
aatgccatgctttggttagg

SEQ ID NO: 8157 - DNA, 20 bp, Artificial Sequence
  Chr7q_9 Forward Primer
ttcaggataccagtggaggg

SEQ ID NO: 8158 - DNA, 20 bp, Artificial Sequence
  Chr7q_9 Forward Primer
gaacaggctgaaggagatgc

SEQ ID NO: 8159 - DNA, 20 bp, Artificial Sequence
  Chr7q_9 Forward Primer
ccaaacagggcttcctcata

SEQ ID NO: 8160 - DNA, 20 bp, Artificial Sequence
  Chr7q_9 Forward Primer
actcttgagctcagtgctgc

SEQ ID NO: 8161 - DNA, 20 bp, Artificial Sequence
  Chr7q_9 Forward Primer
tgaaaagtcattggaagcca

SEQ ID NO: 8162 - DNA, 20 bp, Artificial Sequence
  Chr7q_9 Forward Primer
gctaaaacctcccagctcct

SEQ ID NO: 8163 - DNA, 18 bp, Artificial Sequence
  Chr7q_9 Forward Primer
gagctcctctggggccta

SEQ ID NO: 8164 - DNA, 20 bp, Artificial Sequence
  Chr7q_9 Forward Primer
aatgaccctggctgtttcac

SEQ ID NO: 8165 - DNA, 20 bp, Artificial Sequence
  Chr7q_9 Forward Primer
tccgctttgcctcttctaaa

SEQ ID NO: 8166 - DNA, 20 bp, Artificial Sequence
  Chr7q_9 Forward Primer
gggagagacaacaaatgcct

SEQ ID NO: 8167 - DNA, 20 bp, Artificial Sequence
  Chr7q_9 Forward Primer
tttgctgtctagggacaggg

SEQ ID NO: 8168 - DNA, 22 bp, Artificial Sequence
  Chr7q_9 Forward Primer
tcaaccttcaaactcagctcaa

SEQ ID NO: 8169 - DNA, 20 bp, Artificial Sequence
  Chr7q_9 Forward Primer
gaaattcctttgaggagggc

SEQ ID NO: 8170 - DNA, 20 bp, Artificial Sequence
  Chr7q_9 Forward Primer
ttttgtgagcaagcgtcatc

SEQ ID NO: 8171 - DNA, 20 bp, Artificial Sequence
  Chr7q_9 Forward Primer
tgtccagtgacctcagcaag

SEQ ID NO: 8172 - DNA, 20 bp, Artificial Sequence
  Chr7q_9 Forward Primer
tgtctaagggcacgacacaa

SEQ ID NO: 8173 - DNA, 20 bp, Artificial Sequence
  Chr7q_9 Forward Primer
gctgtcttctgggaacttgc

SEQ ID NO: 8174 - DNA, 20 bp, Artificial Sequence
  Chr7q_9 Forward Primer
cccagaccctcagaccacta

SEQ ID NO: 8175 - DNA, 20 bp, Artificial Sequence
  Chr7q_9 Forward Primer
aatgggcagaaaggtctgtg

SEQ ID NO: 8176 - DNA, 20 bp, Artificial Sequence
  Chr7q_9 Forward Primer
ccagcagatgctaaagtggc

SEQ ID NO: 8177 - DNA, 20 bp, Artificial Sequence
  Chr7q_9 Reverse Primer
acacgccatatcctgtctcc

SEQ ID NO: 8178 - DNA, 20 bp, Artificial Sequence
  Chr7q_9 Reverse Primer
ccctattcccagaacaaagc

SEQ ID NO: 8179 - DNA, 21 bp, Artificial Sequence
  Chr7q_9 Reverse Primer
catccttcttccactggactg

SEQ ID NO: 8180 - DNA, 20 bp, Artificial Sequence
  Chr7q_9 Reverse Primer
ttctccactgtaccaaggca

SEQ ID NO: 8181 - DNA, 20 bp, Artificial Sequence
  Chr7q_9 Reverse Primer
tgcacaccctgtatgttcct

SEQ ID NO: 8182 - DNA, 20 bp, Artificial Sequence
  Chr7q_9 Reverse Primer
tctggaaggctcagatgtca

SEQ ID NO: 8183 - DNA, 20 bp, Artificial Sequence
  Chr7q_9 Reverse Primer
acgaatgatggtgaaggcat

SEQ ID NO: 8184 - DNA, 22 bp, Artificial Sequence
  Chr7q_9 Reverse Primer
aaaacgtttctcccttaggttc

SEQ ID NO: 8185 - DNA, 20 bp, Artificial Sequence
  Chr7q_9 Reverse Primer
ctttcctgccatttccattg

SEQ ID NO: 8186 - DNA, 20 bp, Artificial Sequence
  Chr7q_9 Reverse Primer
cagttatgggagaatcgcgt

SEQ ID NO: 8187 - DNA, 20 bp, Artificial Sequence
  Chr7q_9 Reverse Primer
tgagctgctgttctgctcac

SEQ ID NO: 8188 - DNA, 20 bp, Artificial Sequence
  Chr7q_9 Reverse Primer
accactgtttccctgattgc

SEQ ID NO: 8189 - DNA, 20 bp, Artificial Sequence
  Chr7q_9 Reverse Primer
ttcttcagcccaagacaatg

SEQ ID NO: 8190 - DNA, 25 bp, Artificial Sequence
  Chr7q_9 Reverse Primer
ttgattatttcttgtacacagtggc

SEQ ID NO: 8191 - DNA, 20 bp, Artificial Sequence
  Chr7q_9 Reverse Primer
ggccaagaagttgaaacgaa

SEQ ID NO: 8192 - DNA, 20 bp, Artificial Sequence
  Chr7q_9 Reverse Primer
tggatcccacatcctaccat

SEQ ID NO: 8193 - DNA, 20 bp, Artificial Sequence
  Chr7q_9 Reverse Primer
gggcacaaaattaatgagcg

SEQ ID NO: 8194 - DNA, 22 bp, Artificial Sequence
  Chr7q_9 Reverse Primer
gaatcaatgttcaggttgatgg

SEQ ID NO: 8195 - DNA, 20 bp, Artificial Sequence
  Chr7q_9 Reverse Primer
tctacacctccagccctttc

SEQ ID NO: 8196 - DNA, 20 bp, Artificial Sequence
  Chr7q_9 Reverse Primer
ccactctgggtggctaagaa

SEQ ID NO: 8197 - DNA, 21 bp, Artificial Sequence
  Chr7q_9 Reverse Primer
tttttaaccccatgaaccaga

SEQ ID NO: 8198 - DNA, 20 bp, Artificial Sequence
  Chr7q_9 Reverse Primer
aagcgtcacagctggctaat

SEQ ID NO: 8199 - DNA, 20 bp, Artificial Sequence
  Chr7q_9 Reverse Primer
gggagcacatgacctgtttt

SEQ ID NO: 8200 - DNA, 20 bp, Artificial Sequence
  Chr7q_9 Reverse Primer
ttggggaccactggactaaa

SEQ ID NO: 8201 - DNA, 20 bp, Artificial Sequence
  Chr7q_9 Reverse Primer
gcgttgcagacaaatcaaag

SEQ ID NO: 8202 - DNA, 20 bp, Artificial Sequence
  Chr7q_9 Reverse Primer
cacccaacccttctctttgt

SEQ ID NO: 8203 - DNA, 20 bp, Artificial Sequence
  Chr7q_9 Reverse Primer
gaggctttggtttcttgctg

SEQ ID NO: 8204 - DNA, 20 bp, Artificial Sequence
  Chr7q_9 Reverse Primer
acagcacaggcttttccatt

SEQ ID NO: 8205 - DNA, 20 bp, Artificial Sequence
  Chr7q_9 Reverse Primer
acaacaggctcctggaaatg

SEQ ID NO: 8206 - DNA, 20 bp, Artificial Sequence
  Chr7q_9 Reverse Primer
ggattgccatgcatttgttt

SEQ ID NO: 8207 - DNA, 20 bp, Artificial Sequence
  Chr7q_9 Reverse Primer
atagcccaagctggatgatg

SEQ ID NO: 8208 - DNA, 20 bp, Artificial Sequence
  Chr7q_9 Reverse Primer
tctctggcctcattgatcct

SEQ ID NO: 8209 - DNA, 20 bp, Artificial Sequence
  Chr7q_9 Reverse Primer
ccttgttgtgcccttttgtt

SEQ ID NO: 8210 - DNA, 20 bp, Artificial Sequence
  Chr7q_9 Reverse Primer
gcagaaggtgagggatctga

SEQ ID NO: 8211 - DNA, 20 bp, Artificial Sequence
  Chr7q_9 Reverse Primer
gatcttcaatggacatgggc

SEQ ID NO: 8212 - DNA, 25 bp, Artificial Sequence
  Chr7q_9 Reverse Primer
ttgaagctctcctttaagtcaaaaa

SEQ ID NO: 8213 - DNA, 20 bp, Artificial Sequence
  Chr7q_9 Reverse Primer
gcattgagggcacctagaag

SEQ ID NO: 8214 - DNA, 20 bp, Artificial Sequence
  Chr7q_9 Reverse Primer
ctaaaggggcaaaagcacaa

SEQ ID NO: 8215 - DNA, 20 bp, Artificial Sequence
  Chr7q_9 Reverse Primer
ggagggaagagaatctccca

SEQ ID NO: 8216 - DNA, 27 bp, Artificial Sequence
  Chr7q_9 Reverse Primer
aacataaaatacctcaatatccttgaa

SEQ ID NO: 8217 - DNA, 20 bp, Artificial Sequence
  Chr7q_9 Reverse Primer
aattccagtttccccattcc

SEQ ID NO: 8218 - DNA, 20 bp, Artificial Sequence
  Chr7q_9 Reverse Primer
ccaacagcaaagcagaatca

SEQ ID NO: 8219 - DNA, 20 bp, Artificial Sequence
  Chr7q_9 Reverse Primer
ccaggagttattgggtggtg

SEQ ID NO: 8220 - DNA, 20 bp, Artificial Sequence
  Chr7q_9 Reverse Primer
tatgaatcctgcttccaggc

SEQ ID NO: 8221 - DNA, 20 bp, Artificial Sequence
  Chr7q_9 Reverse Primer
gggacaaacgttcagaccat

SEQ ID NO: 8222 - DNA, 20 bp, Artificial Sequence
  Chr7q_9 Reverse Primer
agctgcctgcagttttcatt

SEQ ID NO: 8223 - DNA, 20 bp, Artificial Sequence
  Chr7q_9 Reverse Primer
gctccacccacactgatctt

SEQ ID NO: 8224 - DNA, 20 bp, Artificial Sequence
  Chr7q_9 Reverse Primer
cttacgcctcttcctgaacg

SEQ ID NO: 8225 - DNA, 20 bp, Artificial Sequence
  Chr7q_9 Reverse Primer
aaaagtgagctttctgggca

SEQ ID NO: 8226 - DNA, 20 bp, Artificial Sequence
  Chr7q_9 Reverse Primer
gggttacggcttgagtgtgt

SEQ ID NO: 8227 - DNA, 20 bp, Artificial Sequence
  Chr7q_9 Reverse Primer
cctttctggaagggtttctg

SEQ ID NO: 8228 - DNA, 20 bp, Artificial Sequence
  Chr7q_9 Reverse Primer
cagaggatactggctggagg

SEQ ID NO: 8229 - DNA, 20 bp, Artificial Sequence
  Chr7q_9 Reverse Primer
gatgccagtctggaccatgt

SEQ ID NO: 8230 - DNA, 20 bp, Artificial Sequence
  Chr7q_9 Reverse Primer
tcgcgggagtctctatgtct

SEQ ID NO: 8231 - DNA, 20 bp, Artificial Sequence
  Chr7q_9 Reverse Primer
gtggacttccaaatcccctt

SEQ ID NO: 8232 - DNA, 20 bp, Artificial Sequence
  Chr7q_9 Reverse Primer
acagtctgcctgtgctcctt

SEQ ID NO: 8233 - DNA, 20 bp, Artificial Sequence
  Chr7q_9 Reverse Primer
catgtgaggctcccacctac

SEQ ID NO: 8234 - DNA, 20 bp, Artificial Sequence
  Chr7q_9 Reverse Primer
tcccgtcaccttacaccaat

SEQ ID NO: 8235 - DNA, 26 bp, Artificial Sequence
  Chr7q_9 Reverse Primer
tttcaatgatatctctgacttttcaa

SEQ ID NO: 8236 - DNA, 20 bp, Artificial Sequence
  Chr7q_9 Reverse Primer
gccgcaatcacgacttttat

SEQ ID NO: 8237 - DNA, 20 bp, Artificial Sequence
  Chr7q_9 Reverse Primer
gagtcccaggccttcataca

SEQ ID NO: 8238 - DNA, 20 bp, Artificial Sequence
  Chr7q_9 Reverse Primer
ttctccacgctgttttctca

SEQ ID NO: 8239 - DNA, 20 bp, Artificial Sequence
  Chr7q_9 Reverse Primer
tctcccatttctccctcctt

SEQ ID NO: 8240 - DNA, 19 bp, Artificial Sequence
  Chr7q_9 Reverse Primer
tgctccatgggccataaat

SEQ ID NO: 8241 - DNA, 20 bp, Artificial Sequence
  Chr7q_9 Reverse Primer
gtcaccactgggctttctgt

SEQ ID NO: 8242 - DNA, 20 bp, Artificial Sequence
  Chr7q_9 Reverse Primer
aggtctttacgccagcacac

SEQ ID NO: 8243 - DNA, 20 bp, Artificial Sequence
  Chr7q_9 Reverse Primer
tgagtgttcctgacccacag

SEQ ID NO: 8244 - DNA, 23 bp, Artificial Sequence
  Chr7q_9 Reverse Primer
tcttgggagatactaagcacaaa

SEQ ID NO: 8245 - DNA, 20 bp, Artificial Sequence
  Chr7q_9 Reverse Primer
ctattccaaggaggccatga

SEQ ID NO: 8246 - DNA, 20 bp, Artificial Sequence
  Chr7q_9 Reverse Primer
cctcaactgatcacatccca

SEQ ID NO: 8247 - DNA, 20 bp, Artificial Sequence
  Chr7q_9 Reverse Primer
tagcaatacccagggcttga

SEQ ID NO: 8248 - DNA, 22 bp, Artificial Sequence
  Chr7q_9 Reverse Primer
gggacaaaagttgctgattaca

SEQ ID NO: 8249 - DNA, 20 bp, Artificial Sequence
  Chr7q_9 Reverse Primer
gggcctttacaatttgggat

SEQ ID NO: 8250 - DNA, 20 bp, Artificial Sequence
  Chr7q_9 Reverse Primer
cgaaagaacaaagaccccaa

SEQ ID NO: 8251 - DNA, 20 bp, Artificial Sequence
  Chr7q_9 Reverse Primer
ctctcccctgagttctgcat

SEQ ID NO: 8252 - DNA, 20 bp, Artificial Sequence
  Chr7q_9 Reverse Primer
aaggtcaaccccatgtcatc

SEQ ID NO: 8253 - DNA, 20 bp, Artificial Sequence
  Chr7q_9 Reverse Primer
tcccaactcttcatttggct

SEQ ID NO: 8254 - DNA, 20 bp, Artificial Sequence
  Chr7q_9 Reverse Primer
accagccagaaacttacccc

SEQ ID NO: 8255 - DNA, 20 bp, Artificial Sequence
  Chr7q_9 Reverse Primer
tcaggaaagtcaccggactc

SEQ ID NO: 8256 - DNA, 20 bp, Artificial Sequence
  Chr7q_9 Reverse Primer
aagaatggacagccaaaagc

SEQ ID NO: 8257 - DNA, 20 bp, Artificial Sequence
  Chr7q_9 Reverse Primer
ccactttccttgctttggtc

SEQ ID NO: 8258 - DNA, 20 bp, Artificial Sequence
  Chr7q_9 Reverse Primer
gagttggggtccaagtgcta

SEQ ID NO: 8259 - DNA, 19 bp, Artificial Sequence
  Chr7q_9 Reverse Primer
gctgtgggtgacaagttgc

SEQ ID NO: 8260 - DNA, 20 bp, Artificial Sequence
  Chr7q_9 Reverse Primer
cctcagatggctctgtcctc

SEQ ID NO: 8261 - DNA, 20 bp, Artificial Sequence
  Chr7q_9 Reverse Primer
gggctctttatgagacagcg

SEQ ID NO: 8262 - DNA, 20 bp, Artificial Sequence
  Chr7q_9 Reverse Primer
cgtggtctccctaaaccaaa

SEQ ID NO: 8263 - DNA, 20 bp, Artificial Sequence
  Chr7q_9 Reverse Primer
ggagacagggacaggtgcta

SEQ ID NO: 8264 - DNA, 20 bp, Artificial Sequence
  Chr7q_9 Reverse Primer
gtttccagcccaaactgatg

SEQ ID NO: 8265 - DNA, 20 bp, Artificial Sequence
  Chr7q_9 Reverse Primer
atctggggatcagacgacag

SEQ ID NO: 8266 - DNA, 20 bp, Artificial Sequence
  Chr7q_9 Reverse Primer
ccaactgagaaacgcctcat

SEQ ID NO: 8267 - DNA, 20 bp, Artificial Sequence
  Chr7q_9 Reverse Primer
gctcaccacggatgaagaat

SEQ ID NO: 8268 - DNA, 20 bp, Artificial Sequence
  Chr7q_9 Reverse Primer
ttccttgatctgcaccagaa

SEQ ID NO: 8269 - DNA, 20 bp, Artificial Sequence
  Chr7q_9 Reverse Primer
tgcctatgcacacgaatgtt

SEQ ID NO: 8270 - DNA, 20 bp, Artificial Sequence
  Chr7q_9 Reverse Primer
cctctccatgggctgaaata

SEQ ID NO: 8271 - DNA, 20 bp, Artificial Sequence
  Chr7q_9 Reverse Primer
caactgcatttgagtcaccc

SEQ ID NO: 8272 - DNA, 20 bp, Artificial Sequence
  Chr7q_9 Reverse Primer
agtgaattaacgaagggggc

SEQ ID NO: 8273 - DNA, 20 bp, Artificial Sequence
  Chr8_1 Forward Primer
tatgcctgtgcatgtgtgtg

SEQ ID NO: 8274 - DNA, 20 bp, Artificial Sequence
  Chr8_1 Forward Primer
ctgtttcccaatcacctgct

SEQ ID NO: 8275 - DNA, 20 bp, Artificial Sequence
  Chr8_1 Forward Primer
atttcaacagaggcagctcg

SEQ ID NO: 8276 - DNA, 20 bp, Artificial Sequence
  Chr8_1 Forward Primer
gccaagaaggttaacgaagg

SEQ ID NO: 8277 - DNA, 20 bp, Artificial Sequence
  Chr8_1 Forward Primer
tttccctgctggtaaaatgg

SEQ ID NO: 8278 - DNA, 20 bp, Artificial Sequence
  Chr8_1 Forward Primer
tagtagagacgggggacgaa

SEQ ID NO: 8279 - DNA, 20 bp, Artificial Sequence
  Chr8_1 Forward Primer
aagcctgctctatcaccgtc

SEQ ID NO: 8280 - DNA, 20 bp, Artificial Sequence
  Chr8_1 Forward Primer
gctgatgtccctgtgtcaaa

SEQ ID NO: 8281 - DNA, 20 bp, Artificial Sequence
  Chr8_1 Forward Primer
gggaggaattccagaccaat

SEQ ID NO: 8282 - DNA, 20 bp, Artificial Sequence
  Chr8_1 Forward Primer
aagccagcccattagaggtt

SEQ ID NO: 8283 - DNA, 19 bp, Artificial Sequence
  Chr8_1 Forward Primer
gtgatgctacggtcccctc

SEQ ID NO: 8284 - DNA, 20 bp, Artificial Sequence
  Chr8_1 Forward Primer
gctggggaatacagaggtga

SEQ ID NO: 8285 - DNA, 20 bp, Artificial Sequence
  Chr8_1 Forward Primer
tcacaaaatggcatgtgagc

SEQ ID NO: 8286 - DNA, 20 bp, Artificial Sequence
  Chr8_1 Forward Primer
agttccctgatttcccgagt

SEQ ID NO: 8287 - DNA, 21 bp, Artificial Sequence
  Chr8_1 Forward Primer
tcctgttctcttcttgaacgc

SEQ ID NO: 8288 - DNA, 20 bp, Artificial Sequence
  Chr8_1 Forward Primer
acaagctggacaaatacgcc

SEQ ID NO: 8289 - DNA, 21 bp, Artificial Sequence
  Chr8_1 Forward Primer
cctgaaatgatcatggctgtt

SEQ ID NO: 8290 - DNA, 20 bp, Artificial Sequence
  Chr8_1 Forward Primer
cttcctttcaccagggtcag

SEQ ID NO: 8291 - DNA, 18 bp, Artificial Sequence
  Chr8_1 Forward Primer
accagtgcgaactctggg

SEQ ID NO: 8292 - DNA, 20 bp, Artificial Sequence
  Chr8_1 Forward Primer
caacaggtatggctgtggtg

SEQ ID NO: 8293 - DNA, 20 bp, Artificial Sequence
  Chr8_1 Forward Primer
aaggtaatggcatctgggtg

SEQ ID NO: 8294 - DNA, 23 bp, Artificial Sequence
  Chr8_1 Forward Primer
ttttcacaaaagaccctgacatt

SEQ ID NO: 8295 - DNA, 20 bp, Artificial Sequence
  Chr8_1 Forward Primer
ggtgtgtgtgcttgtgtgtg

SEQ ID NO: 8296 - DNA, 20 bp, Artificial Sequence
  Chr8_1 Forward Primer
caggagggtgaacacaaatg

SEQ ID NO: 8297 - DNA, 20 bp, Artificial Sequence
  Chr8_1 Forward Primer
tgggagtgagaccaaggagt

SEQ ID NO: 8298 - DNA, 20 bp, Artificial Sequence
  Chr8_1 Forward Primer
gttgaaaggagctgtctccg

SEQ ID NO: 8299 - DNA, 20 bp, Artificial Sequence
  Chr8_1 Forward Primer
tctctccctctgtctggctc

SEQ ID NO: 8300 - DNA, 20 bp, Artificial Sequence
  Chr8_1 Forward Primer
ctttgtcctgctggaatggt

SEQ ID NO: 8301 - DNA, 20 bp, Artificial Sequence
  Chr8_1 Forward Primer
tagatgccaggtggaccttc

SEQ ID NO: 8302 - DNA, 20 bp, Artificial Sequence
  Chr8_1 Forward Primer
ctgaggggagaaggaaggat

SEQ ID NO: 8303 - DNA, 21 bp, Artificial Sequence
  Chr8_1 Forward Primer
agtgaaagagaggggtccaag

SEQ ID NO: 8304 - DNA, 20 bp, Artificial Sequence
  Chr8_1 Forward Primer
agcttgttcccaagctgtgt

SEQ ID NO: 8305 - DNA, 20 bp, Artificial Sequence
  Chr8_1 Forward Primer
gggaaacttgggaaaaggaa

SEQ ID NO: 8306 - DNA, 20 bp, Artificial Sequence
  Chr8_1 Forward Primer
aaagaagctcccccttggta

SEQ ID NO: 8307 - DNA, 20 bp, Artificial Sequence
  Chr8_1 Forward Primer
agctgcccatgagaattgat

SEQ ID NO: 8308 - DNA, 20 bp, Artificial Sequence
  Chr8_1 Forward Primer
aagctgtgatttgcctccaa

SEQ ID NO: 8309 - DNA, 20 bp, Artificial Sequence
  Chr8_1 Forward Primer
gagaaaaggtgagacagcgg

SEQ ID NO: 8310 - DNA, 20 bp, Artificial Sequence
  Chr8_1 Forward Primer
caggagctgtgaaacagcaa

SEQ ID NO: 8311 - DNA, 20 bp, Artificial Sequence
  Chr8_1 Forward Primer
gcaactatttttgccctgga

SEQ ID NO: 8312 - DNA, 20 bp, Artificial Sequence
  Chr8_1 Forward Primer
gtgcctgacaggtgtgtgat

SEQ ID NO: 8313 - DNA, 20 bp, Artificial Sequence
  Chr8_1 Forward Primer
atggctccctccttgagaat

SEQ ID NO: 8314 - DNA, 20 bp, Artificial Sequence
  Chr8_1 Forward Primer
catgttctgagaggcagcag

SEQ ID NO: 8315 - DNA, 20 bp, Artificial Sequence
  Chr8_1 Forward Primer
ttcggcttgtattcctccac

SEQ ID NO: 8316 - DNA, 23 bp, Artificial Sequence
  Chr8_1 Forward Primer
ttcagcacgtatagtggaacaga

SEQ ID NO: 8317 - DNA, 20 bp, Artificial Sequence
  Chr8_1 Forward Primer
ggagtcacgtggaccttgtt

SEQ ID NO: 8318 - DNA, 20 bp, Artificial Sequence
  Chr8_1 Forward Primer
atcatcccatcacgactggt

SEQ ID NO: 8319 - DNA, 20 bp, Artificial Sequence
  Chr8_1 Forward Primer
gtcccgcagactttctcttg

SEQ ID NO: 8320 - DNA, 20 bp, Artificial Sequence
  Chr8_1 Forward Primer
gcatcatgttgctgtttcgt

SEQ ID NO: 8321 - DNA, 20 bp, Artificial Sequence
  Chr8_1 Forward Primer
gaaggaaccgtacattccga

SEQ ID NO: 8322 - DNA, 20 bp, Artificial Sequence
  Chr8_1 Forward Primer
gggatcagtccaaagtgagc

SEQ ID NO: 8323 - DNA, 20 bp, Artificial Sequence
  Chr8_1 Forward Primer
atgctcatgtgttcaccacc

SEQ ID NO: 8324 - DNA, 20 bp, Artificial Sequence
  Chr8_1 Forward Primer
acttctccccctaccacaca

SEQ ID NO: 8325 - DNA, 20 bp, Artificial Sequence
  Chr8_1 Forward Primer
taattcttccgcagtggctt

SEQ ID NO: 8326 - DNA, 20 bp, Artificial Sequence
  Chr8_1 Forward Primer
ggtcactctcaagtgcacca

SEQ ID NO: 8327 - DNA, 20 bp, Artificial Sequence
  Chr8_1 Forward Primer
gaatcctggagagggagacc

SEQ ID NO: 8328 - DNA, 20 bp, Artificial Sequence
  Chr8_1 Forward Primer
tatggagggtctatgctggg

SEQ ID NO: 8329 - DNA, 20 bp, Artificial Sequence
  Chr8_1 Forward Primer
tgggattttaccaggctgag

SEQ ID NO: 8330 - DNA, 18 bp, Artificial Sequence
  Chr8_1 Forward Primer
gacgagggcctgtacacc

SEQ ID NO: 8331 - DNA, 20 bp, Artificial Sequence
  Chr8_1 Forward Primer
gggacacaatccggaataga

SEQ ID NO: 8332 - DNA, 20 bp, Artificial Sequence
  Chr8_1 Forward Primer
gggaagcttcactcattcca

SEQ ID NO: 8333 - DNA, 20 bp, Artificial Sequence
  Chr8_1 Forward Primer
tgtctgtttcactcccctcc

SEQ ID NO: 8334 - DNA, 20 bp, Artificial Sequence
  Chr8_1 Forward Primer
tagacactcccgccaagttt

SEQ ID NO: 8335 - DNA, 20 bp, Artificial Sequence
  Chr8_1 Forward Primer
tctgttggttttcatgcagc

SEQ ID NO: 8336 - DNA, 20 bp, Artificial Sequence
  Chr8_1 Forward Primer
tatgcaccatagcaggacca

SEQ ID NO: 8337 - DNA, 20 bp, Artificial Sequence
  Chr8_1 Forward Primer
tgtgccttttctatccctgc

SEQ ID NO: 8338 - DNA, 20 bp, Artificial Sequence
  Chr8_1 Forward Primer
gagcccagcataaccacact

SEQ ID NO: 8339 - DNA, 21 bp, Artificial Sequence
  Chr8_1 Forward Primer
gaagaatgccagctcatttct

SEQ ID NO: 8340 - DNA, 20 bp, Artificial Sequence
  Chr8_1 Forward Primer
agttctgcagggagtgctgt

SEQ ID NO: 8341 - DNA, 20 bp, Artificial Sequence
  Chr8_1 Forward Primer
aatgagggtgcatttggaag

SEQ ID NO: 8342 - DNA, 21 bp, Artificial Sequence
  Chr8_1 Forward Primer
gctcttttctcctgggaattt

SEQ ID NO: 8343 - DNA, 20 bp, Artificial Sequence
  Chr8_1 Forward Primer
tggcgtgagatattgtcctg

SEQ ID NO: 8344 - DNA, 20 bp, Artificial Sequence
  Chr8_1 Forward Primer
cccttggacctcagaaggtt

SEQ ID NO: 8345 - DNA, 20 bp, Artificial Sequence
  Chr8_1 Forward Primer
ccttacgcacatggtccttt

SEQ ID NO: 8346 - DNA, 20 bp, Artificial Sequence
  Chr8_1 Forward Primer
aaatgaaaaccgcaggtcag

SEQ ID NO: 8347 - DNA, 26 bp, Artificial Sequence
  Chr8_1 Forward Primer
cgatttcattttacattttctaagca

SEQ ID NO: 8348 - DNA, 20 bp, Artificial Sequence
  Chr8_1 Forward Primer
agagtgccatgggtgaaaac

SEQ ID NO: 8349 - DNA, 20 bp, Artificial Sequence
  Chr8_1 Forward Primer
cgtatgtcccaatgtttccc

SEQ ID NO: 8350 - DNA, 20 bp, Artificial Sequence
  Chr8_1 Forward Primer
gcagacagatcagggaggag

SEQ ID NO: 8351 - DNA, 20 bp, Artificial Sequence
  Chr8_1 Forward Primer
catgattgtggtggggtaca

SEQ ID NO: 8352 - DNA, 20 bp, Artificial Sequence
  Chr8_1 Forward Primer
gtgtgcattgaacaggcaat

SEQ ID NO: 8353 - DNA, 20 bp, Artificial Sequence
  Chr8_1 Forward Primer
ttgctggctaaaaatggctc

SEQ ID NO: 8354 - DNA, 20 bp, Artificial Sequence
  Chr8_1 Forward Primer
agcccacttgctcagtcatt

SEQ ID NO: 8355 - DNA, 23 bp, Artificial Sequence
  Chr8_1 Forward Primer
ggatttttaagtggaggaaacca

SEQ ID NO: 8356 - DNA, 19 bp, Artificial Sequence
  Chr8_1 Forward Primer
cgtgtgcttagcggtgtct

SEQ ID NO: 8357 - DNA, 20 bp, Artificial Sequence
  Chr8_1 Forward Primer
agtcagatgtcttgccccag

SEQ ID NO: 8358 - DNA, 20 bp, Artificial Sequence
  Chr8_1 Forward Primer
ttcagttttggaatttcggc

SEQ ID NO: 8359 - DNA, 20 bp, Artificial Sequence
  Chr8_1 Forward Primer
tcaggaaacgaaacccagtc

SEQ ID NO: 8360 - DNA, 20 bp, Artificial Sequence
  Chr8_1 Forward Primer
caaacagaaatccccacacc

SEQ ID NO: 8361 - DNA, 20 bp, Artificial Sequence
  Chr8_1 Forward Primer
gctctgagggcacatggtat

SEQ ID NO: 8362 - DNA, 20 bp, Artificial Sequence
  Chr8_1 Forward Primer
aggaagcatctttggggttt

SEQ ID NO: 8363 - DNA, 20 bp, Artificial Sequence
  Chr8_1 Forward Primer
tgctggggaaaatgaggtta

SEQ ID NO: 8364 - DNA, 20 bp, Artificial Sequence
  Chr8_1 Forward Primer
atgcacacaagacgcagaag

SEQ ID NO: 8365 - DNA, 20 bp, Artificial Sequence
  Chr8_1 Forward Primer
ggaaacaggaatggaaacga

SEQ ID NO: 8366 - DNA, 21 bp, Artificial Sequence
  Chr8_1 Forward Primer
ctatagacacctggactgcgg

SEQ ID NO: 8367 - DNA, 21 bp, Artificial Sequence
  Chr8_1 Forward Primer
gccacattaacgtgtggtaca

SEQ ID NO: 8368 - DNA, 20 bp, Artificial Sequence
  Chr8_1 Forward Primer
ttgaaatgcgaaccactgag

SEQ ID NO: 8369 - DNA, 20 bp, Artificial Sequence
  Chr8_1 Reverse Primer
ggctctctgtgaagacgacc

SEQ ID NO: 8370 - DNA, 20 bp, Artificial Sequence
  Chr8_1 Reverse Primer
ctggaaagggactgagcttg

SEQ ID NO: 8371 - DNA, 20 bp, Artificial Sequence
  Chr8_1 Reverse Primer
attcccagaagtagcagggg

SEQ ID NO: 8372 - DNA, 20 bp, Artificial Sequence
  Chr8_1 Reverse Primer
tgtagcccccaaaacctaaa

SEQ ID NO: 8373 - DNA, 20 bp, Artificial Sequence
  Chr8_1 Reverse Primer
aacgtgaggatcagaggtgc

SEQ ID NO: 8374 - DNA, 20 bp, Artificial Sequence
  Chr8_1 Reverse Primer
cactgagatccccacgactt

SEQ ID NO: 8375 - DNA, 20 bp, Artificial Sequence
  Chr8_1 Reverse Primer
aggaccaacttgtccagcac

SEQ ID NO: 8376 - DNA, 20 bp, Artificial Sequence
  Chr8_1 Reverse Primer
gacaggtggcttgcaagatt

SEQ ID NO: 8377 - DNA, 20 bp, Artificial Sequence
  Chr8_1 Reverse Primer
aattgcagggatcgagaaga

SEQ ID NO: 8378 - DNA, 20 bp, Artificial Sequence
  Chr8_1 Reverse Primer
cagaaatgaggtgggaggaa

SEQ ID NO: 8379 - DNA, 20 bp, Artificial Sequence
  Chr8_1 Reverse Primer
taagttaggctgggggaggt

SEQ ID NO: 8380 - DNA, 20 bp, Artificial Sequence
  Chr8_1 Reverse Primer
catctcactgccatcccttt

SEQ ID NO: 8381 - DNA, 20 bp, Artificial Sequence
  Chr8_1 Reverse Primer
ggcagcaaataaaagccatt

SEQ ID NO: 8382 - DNA, 20 bp, Artificial Sequence
  Chr8_1 Reverse Primer
tgacagtgcacaactgcaaa

SEQ ID NO: 8383 - DNA, 20 bp, Artificial Sequence
  Chr8_1 Reverse Primer
gtggacatcctcctccaagt

SEQ ID NO: 8384 - DNA, 20 bp, Artificial Sequence
  Chr8_1 Reverse Primer
aatgtgtgtctctcccaggc

SEQ ID NO: 8385 - DNA, 20 bp, Artificial Sequence
  Chr8_1 Reverse Primer
acaaaaagggtcttgagggc

SEQ ID NO: 8386 - DNA, 20 bp, Artificial Sequence
  Chr8_1 Reverse Primer
cgctttcctcgttcagactc

SEQ ID NO: 8387 - DNA, 20 bp, Artificial Sequence
  Chr8_1 Reverse Primer
cctgtactttcccggttcag

SEQ ID NO: 8388 - DNA, 20 bp, Artificial Sequence
  Chr8_1 Reverse Primer
tcccagagtttgcattcctc

SEQ ID NO: 8389 - DNA, 20 bp, Artificial Sequence
  Chr8_1 Reverse Primer
acatactgaccctgggtgct

SEQ ID NO: 8390 - DNA, 20 bp, Artificial Sequence
  Chr8_1 Reverse Primer
ttttcaggaggcgttaatgg

SEQ ID NO: 8391 - DNA, 20 bp, Artificial Sequence
  Chr8_1 Reverse Primer
ctctgggaattagcaggcac

SEQ ID NO: 8392 - DNA, 20 bp, Artificial Sequence
  Chr8_1 Reverse Primer
ctctcccccagagcaagaat

SEQ ID NO: 8393 - DNA, 20 bp, Artificial Sequence
  Chr8_1 Reverse Primer
gtgggccctcaacagtaaga

SEQ ID NO: 8394 - DNA, 20 bp, Artificial Sequence
  Chr8_1 Reverse Primer
ctggacggggacaaagacta

SEQ ID NO: 8395 - DNA, 20 bp, Artificial Sequence
  Chr8_1 Reverse Primer
acacagaggagctggtggac

SEQ ID NO: 8396 - DNA, 20 bp, Artificial Sequence
  Chr8_1 Reverse Primer
ctgaagcctctcgaacatcc

SEQ ID NO: 8397 - DNA, 20 bp, Artificial Sequence
  Chr8_1 Reverse Primer
caatgtccttacaatggccc

SEQ ID NO: 8398 - DNA, 20 bp, Artificial Sequence
  Chr8_1 Reverse Primer
agcaaatcctgctggctcta

SEQ ID NO: 8399 - DNA, 20 bp, Artificial Sequence
  Chr8_1 Reverse Primer
tgaaggcaggtggtctcttt

SEQ ID NO: 8400 - DNA, 20 bp, Artificial Sequence
  Chr8_1 Reverse Primer
aggggatcattgacttgtgg

SEQ ID NO: 8401 - DNA, 20 bp, Artificial Sequence
  Chr8_1 Reverse Primer
ccaacacattctgccactga

SEQ ID NO: 8402 - DNA, 20 bp, Artificial Sequence
  Chr8_1 Reverse Primer
aatgaatggggagtgagcat

SEQ ID NO: 8403 - DNA, 20 bp, Artificial Sequence
  Chr8_1 Reverse Primer
tcctgttctgacaggttccc

SEQ ID NO: 8404 - DNA, 20 bp, Artificial Sequence
  Chr8_1 Reverse Primer
aaacaaacgcaaagacctgc

SEQ ID NO: 8405 - DNA, 18 bp, Artificial Sequence
  Chr8_1 Reverse Primer
gcaaaacacgtgggctct

SEQ ID NO: 8406 - DNA, 25 bp, Artificial Sequence
  Chr8_1 Reverse Primer
caatgtacttgaaaacattttgtgg

SEQ ID NO: 8407 - DNA, 19 bp, Artificial Sequence
  Chr8_1 Reverse Primer
gcctcaggcagagcttctc

SEQ ID NO: 8408 - DNA, 20 bp, Artificial Sequence
  Chr8_1 Reverse Primer
ggagtgtgggctacatggac

SEQ ID NO: 8409 - DNA, 20 bp, Artificial Sequence
  Chr8_1 Reverse Primer
tcctctacaacgatcccacc

SEQ ID NO: 8410 - DNA, 20 bp, Artificial Sequence
  Chr8_1 Reverse Primer
atttccagatcaccacaggc

SEQ ID NO: 8411 - DNA, 20 bp, Artificial Sequence
  Chr8_1 Reverse Primer
cgtgtccgagaactgtgcta

SEQ ID NO: 8412 - DNA, 20 bp, Artificial Sequence
  Chr8_1 Reverse Primer
ctggtagctcctttccaagc

SEQ ID NO: 8413 - DNA, 20 bp, Artificial Sequence
  Chr8_1 Reverse Primer
cccaggaaatggagacaaga

SEQ ID NO: 8414 - DNA, 20 bp, Artificial Sequence
  Chr8_1 Reverse Primer
aaggcctgatcccagaagat

SEQ ID NO: 8415 - DNA, 20 bp, Artificial Sequence
  Chr8_1 Reverse Primer
accctgcaagacagcaaagt

SEQ ID NO: 8416 - DNA, 20 bp, Artificial Sequence
  Chr8_1 Reverse Primer
gactgctagggtgaagccag

SEQ ID NO: 8417 - DNA, 20 bp, Artificial Sequence
  Chr8_1 Reverse Primer
accgagtgttggatgtagcc

SEQ ID NO: 8418 - DNA, 20 bp, Artificial Sequence
  Chr8_1 Reverse Primer
ctatgctgtaactgcgccac

SEQ ID NO: 8419 - DNA, 20 bp, Artificial Sequence
  Chr8_1 Reverse Primer
actggctgcttccatcatct

SEQ ID NO: 8420 - DNA, 20 bp, Artificial Sequence
  Chr8_1 Reverse Primer
tcgtgtgtgaagaccaaagg

SEQ ID NO: 8421 - DNA, 20 bp, Artificial Sequence
  Chr8_1 Reverse Primer
aagaggccagaccttccttc

SEQ ID NO: 8422 - DNA, 20 bp, Artificial Sequence
  Chr8_1 Reverse Primer
ccctcagtttgtttcgctgt

SEQ ID NO: 8423 - DNA, 21 bp, Artificial Sequence
  Chr8_1 Reverse Primer
caaaatgactggatggaagga

SEQ ID NO: 8424 - DNA, 20 bp, Artificial Sequence
  Chr8_1 Reverse Primer
cttgagtgggtcaaagtggg

SEQ ID NO: 8425 - DNA, 20 bp, Artificial Sequence
  Chr8_1 Reverse Primer
tggccttctccaaagaacat

SEQ ID NO: 8426 - DNA, 20 bp, Artificial Sequence
  Chr8_1 Reverse Primer
tccaaggagcaaagtggtct

SEQ ID NO: 8427 - DNA, 20 bp, Artificial Sequence
  Chr8_1 Reverse Primer
ccaaagtccagagggaatga

SEQ ID NO: 8428 - DNA, 20 bp, Artificial Sequence
  Chr8_1 Reverse Primer
agcctccatggattcatctg

SEQ ID NO: 8429 - DNA, 20 bp, Artificial Sequence
  Chr8_1 Reverse Primer
gaacttgggcagcaggtaag

SEQ ID NO: 8430 - DNA, 20 bp, Artificial Sequence
  Chr8_1 Reverse Primer
agcctcagaaagcgatgaaa

SEQ ID NO: 8431 - DNA, 20 bp, Artificial Sequence
  Chr8_1 Reverse Primer
atgtgcggatgaaacagtga

SEQ ID NO: 8432 - DNA, 20 bp, Artificial Sequence
  Chr8_1 Reverse Primer
ccccttgatttgaccactgt

SEQ ID NO: 8433 - DNA, 20 bp, Artificial Sequence
  Chr8_1 Reverse Primer
gtaagattccatgcggaacg

SEQ ID NO: 8434 - DNA, 20 bp, Artificial Sequence
  Chr8_1 Reverse Primer
tctctcaggagggaaggaca

SEQ ID NO: 8435 - DNA, 20 bp, Artificial Sequence
  Chr8_1 Reverse Primer
gtacacttcccaggctccaa

SEQ ID NO: 8436 - DNA, 20 bp, Artificial Sequence
  Chr8_1 Reverse Primer
ccaaagtgttccgttgcttt

SEQ ID NO: 8437 - DNA, 20 bp, Artificial Sequence
  Chr8_1 Reverse Primer
tcatctgggaaagaaccagc

SEQ ID NO: 8438 - DNA, 20 bp, Artificial Sequence
  Chr8_1 Reverse Primer
ctgggaaagctggcttacag

SEQ ID NO: 8439 - DNA, 20 bp, Artificial Sequence
  Chr8_1 Reverse Primer
gaccttccttcaaaaagccc

SEQ ID NO: 8440 - DNA, 20 bp, Artificial Sequence
  Chr8_1 Reverse Primer
gtacgtcagcccgttttcat

SEQ ID NO: 8441 - DNA, 20 bp, Artificial Sequence
  Chr8_1 Reverse Primer
ctgcggagagaaaggttgac

SEQ ID NO: 8442 - DNA, 20 bp, Artificial Sequence
  Chr8_1 Reverse Primer
catcacccaggaaccaagtc

SEQ ID NO: 8443 - DNA, 24 bp, Artificial Sequence
  Chr8_1 Reverse Primer
tccagttaaaaccttttgatttct

SEQ ID NO: 8444 - DNA, 20 bp, Artificial Sequence
  Chr8_1 Reverse Primer
cttcatgtggcagaacatgc

SEQ ID NO: 8445 - DNA, 20 bp, Artificial Sequence
  Chr8_1 Reverse Primer
gactcaaaaagccagatgcc

SEQ ID NO: 8446 - DNA, 20 bp, Artificial Sequence
  Chr8_1 Reverse Primer
ctggggaaggttcattccat

SEQ ID NO: 8447 - DNA, 20 bp, Artificial Sequence
  Chr8_1 Reverse Primer
agaaacctgccttgctgaaa

SEQ ID NO: 8448 - DNA, 20 bp, Artificial Sequence
  Chr8_1 Reverse Primer
agcaaattcttgaatcccga

SEQ ID NO: 8449 - DNA, 20 bp, Artificial Sequence
  Chr8_1 Reverse Primer
gggtctattctggcctttcc

SEQ ID NO: 8450 - DNA, 20 bp, Artificial Sequence
  Chr8_1 Reverse Primer
agatcgcacagctactgggt

SEQ ID NO: 8451 - DNA, 20 bp, Artificial Sequence
  Chr8_1 Reverse Primer
tgagtattgggccaagtcaa

SEQ ID NO: 8452 - DNA, 20 bp, Artificial Sequence
  Chr8_1 Reverse Primer
ctccaaccatggagagagga

SEQ ID NO: 8453 - DNA, 20 bp, Artificial Sequence
  Chr8_1 Reverse Primer
caaggcaatgaacagaagca

SEQ ID NO: 8454 - DNA, 20 bp, Artificial Sequence
  Chr8_1 Reverse Primer
gctgggctcattctggtaag

SEQ ID NO: 8455 - DNA, 20 bp, Artificial Sequence
  Chr8_1 Reverse Primer
gaggtttttccagacccaca

SEQ ID NO: 8456 - DNA, 20 bp, Artificial Sequence
  Chr8_1 Reverse Primer
taaaacaccttgcctgctcc

SEQ ID NO: 8457 - DNA, 20 bp, Artificial Sequence
  Chr8_1 Reverse Primer
cacccgaaagtcttccagag

SEQ ID NO: 8458 - DNA, 20 bp, Artificial Sequence
  Chr8_1 Reverse Primer
tttctgctgatctcggaagc

SEQ ID NO: 8459 - DNA, 20 bp, Artificial Sequence
  Chr8_1 Reverse Primer
aatgttgcagcaggaaggag

SEQ ID NO: 8460 - DNA, 20 bp, Artificial Sequence
  Chr8_1 Reverse Primer
aatgtcaccggacagggtaa

SEQ ID NO: 8461 - DNA, 20 bp, Artificial Sequence
  Chr8_1 Reverse Primer
ccacagagggactgaccact

SEQ ID NO: 8462 - DNA, 20 bp, Artificial Sequence
  Chr8_1 Reverse Primer
cctggtaagcctgctgaaaa

SEQ ID NO: 8463 - DNA, 20 bp, Artificial Sequence
  Chr8_1 Reverse Primer
tggctgtcaatacggtcaga

SEQ ID NO: 8464 - DNA, 20 bp, Artificial Sequence
  Chr8_1 Reverse Primer
gatgccaatttggagaagga

SEQ ID NO: 8465 - DNA, 21 bp, Artificial Sequence
  Chr8_2 Forward Primer
gaagtctcaaatggtgaggca

SEQ ID NO: 8466 - DNA, 23 bp, Artificial Sequence
  Chr8_2 Forward Primer
aacatatgcagtttggttcttct

SEQ ID NO: 8467 - DNA, 21 bp, Artificial Sequence
  Chr8_2 Forward Primer
tgcagcatggtgatctaactg

SEQ ID NO: 8468 - DNA, 21 bp, Artificial Sequence
  Chr8_2 Forward Primer
ggccactgtgatgcaagtatt

SEQ ID NO: 8469 - DNA, 20 bp, Artificial Sequence
  Chr8_2 Forward Primer
acgcacacacacacacacac

SEQ ID NO: 8470 - DNA, 20 bp, Artificial Sequence
  Chr8_2 Forward Primer
gcactagatgtgcaaaggca

SEQ ID NO: 8471 - DNA, 20 bp, Artificial Sequence
  Chr8_2 Forward Primer
gccaggtgctatctccaatg

SEQ ID NO: 8472 - DNA, 20 bp, Artificial Sequence
  Chr8_2 Forward Primer
aatgccaaatatcctgtggg

SEQ ID NO: 8473 - DNA, 20 bp, Artificial Sequence
  Chr8_2 Forward Primer
gtgctgatctcagtaggccc

SEQ ID NO: 8474 - DNA, 20 bp, Artificial Sequence
  Chr8_2 Forward Primer
acagtggtgcagacttgctg

SEQ ID NO: 8475 - DNA, 20 bp, Artificial Sequence
  Chr8_2 Forward Primer
taaaaggcaagggtggtgaa

SEQ ID NO: 8476 - DNA, 20 bp, Artificial Sequence
  Chr8_2 Forward Primer
cagattttccaggagccaga

SEQ ID NO: 8477 - DNA, 20 bp, Artificial Sequence
  Chr8_2 Forward Primer
ggcatggttagttgtcccac

SEQ ID NO: 8478 - DNA, 20 bp, Artificial Sequence
  Chr8_2 Forward Primer
cctgaaggttttcctccctc

SEQ ID NO: 8479 - DNA, 20 bp, Artificial Sequence
  Chr8_2 Forward Primer
agggatcagaagaacagggc

SEQ ID NO: 8480 - DNA, 20 bp, Artificial Sequence
  Chr8_2 Forward Primer
taacaggaggagtccaggca

SEQ ID NO: 8481 - DNA, 20 bp, Artificial Sequence
  Chr8_2 Forward Primer
tcagagaacacaggtgggaa

SEQ ID NO: 8482 - DNA, 24 bp, Artificial Sequence
  Chr8_2 Forward Primer
aagcaagcttttaaagtcaaggaa

SEQ ID NO: 8483 - DNA, 24 bp, Artificial Sequence
  Chr8_2 Forward Primer
aagtgattttgtcatcaaatccaa

SEQ ID NO: 8484 - DNA, 21 bp, Artificial Sequence
  Chr8_2 Forward Primer
gagagccaaatggcatagtga

SEQ ID NO: 8485 - DNA, 21 bp, Artificial Sequence
  Chr8_2 Forward Primer
ttccaaaagaaattgccttca

SEQ ID NO: 8486 - DNA, 23 bp, Artificial Sequence
  Chr8_2 Forward Primer
tctactaattccatcggcttcaa

SEQ ID NO: 8487 - DNA, 20 bp, Artificial Sequence
  Chr8_2 Forward Primer
atagcctgcatgcctgtacc

SEQ ID NO: 8488 - DNA, 24 bp, Artificial Sequence
  Chr8_2 Forward Primer
tgcaaaactaaaagaaaaccttga

SEQ ID NO: 8489 - DNA, 20 bp, Artificial Sequence
  Chr8_2 Forward Primer
cagtggggtaggccatagtg

SEQ ID NO: 8490 - DNA, 22 bp, Artificial Sequence
  Chr8_2 Forward Primer
tgaaaatctgctgtgatcctct

SEQ ID NO: 8491 - DNA, 21 bp, Artificial Sequence
  Chr8_2 Forward Primer
tcagccattattttcaaacgc

SEQ ID NO: 8492 - DNA, 21 bp, Artificial Sequence
  Chr8_2 Forward Primer
tgttcactgtagcaatgtgga

SEQ ID NO: 8493 - DNA, 20 bp, Artificial Sequence
  Chr8_2 Forward Primer
tgattccctttgagttgcag

SEQ ID NO: 8494 - DNA, 20 bp, Artificial Sequence
  Chr8_2 Forward Primer
ctaccactcttccgtgggct

SEQ ID NO: 8495 - DNA, 20 bp, Artificial Sequence
  Chr8_2 Forward Primer
gagacccaagtgactgcaca

SEQ ID NO: 8496 - DNA, 20 bp, Artificial Sequence
  Chr8_2 Forward Primer
taccacgacacatgagagcc

SEQ ID NO: 8497 - DNA, 19 bp, Artificial Sequence
  Chr8_2 Forward Primer
agacaggatccagcttgcg

SEQ ID NO: 8498 - DNA, 20 bp, Artificial Sequence
  Chr8_2 Forward Primer
cattccagcagtggttttcc

SEQ ID NO: 8499 - DNA, 20 bp, Artificial Sequence
  Chr8_2 Forward Primer
tcttacatttgcgctgaccc

SEQ ID NO: 8500 - DNA, 20 bp, Artificial Sequence
  Chr8_2 Forward Primer
attgcttagggtagggccag

SEQ ID NO: 8501 - DNA, 20 bp, Artificial Sequence
  Chr8_2 Forward Primer
tggccttgggcaggtagtat

SEQ ID NO: 8502 - DNA, 23 bp, Artificial Sequence
  Chr8_2 Forward Primer
cagacatgctattatgacatccg

SEQ ID NO: 8503 - DNA, 21 bp, Artificial Sequence
  Chr8_2 Forward Primer
caagcatgattaagagggtgc

SEQ ID NO: 8504 - DNA, 21 bp, Artificial Sequence
  Chr8_2 Forward Primer
gaaacagtcctcacatctggc

SEQ ID NO: 8505 - DNA, 21 bp, Artificial Sequence
  Chr8_2 Forward Primer
tggtgcatgatctaaacaacg

SEQ ID NO: 8506 - DNA, 22 bp, Artificial Sequence
  Chr8_2 Forward Primer
cccaaatttaaaaccatggaga

SEQ ID NO: 8507 - DNA, 24 bp, Artificial Sequence
  Chr8_2 Forward Primer
tgtcttttgatttttattccagca

SEQ ID NO: 8508 - DNA, 21 bp, Artificial Sequence
  Chr8_2 Forward Primer
aaagacatggggttttcttcc

SEQ ID NO: 8509 - DNA, 20 bp, Artificial Sequence
  Chr8_2 Forward Primer
ggctctgaagtgacctctgg

SEQ ID NO: 8510 - DNA, 21 bp, Artificial Sequence
  Chr8_2 Forward Primer
ttcacgggacctaaaattgtg

SEQ ID NO: 8511 - DNA, 20 bp, Artificial Sequence
  Chr8_2 Forward Primer
ccaggaagattccttcaggc

SEQ ID NO: 8512 - DNA, 20 bp, Artificial Sequence
  Chr8_2 Forward Primer
atcacccgcaaacaaatgat

SEQ ID NO: 8513 - DNA, 20 bp, Artificial Sequence
  Chr8_2 Forward Primer
gggagacagctggagaatca

SEQ ID NO: 8514 - DNA, 23 bp, Artificial Sequence
  Chr8_2 Forward Primer
tttgttttgcatctacctgatcc

SEQ ID NO: 8515 - DNA, 20 bp, Artificial Sequence
  Chr8_2 Forward Primer
gaggctataccaatgccagc

SEQ ID NO: 8516 - DNA, 21 bp, Artificial Sequence
  Chr8_2 Forward Primer
tggcatgttttgagtatgtgc

SEQ ID NO: 8517 - DNA, 20 bp, Artificial Sequence
  Chr8_2 Forward Primer
tccttcccccatctcctatc

SEQ ID NO: 8518 - DNA, 21 bp, Artificial Sequence
  Chr8_2 Forward Primer
cgtacatgaacctgaaaacca

SEQ ID NO: 8519 - DNA, 20 bp, Artificial Sequence
  Chr8_2 Forward Primer
tcaccaaagttccacaccaa

SEQ ID NO: 8520 - DNA, 20 bp, Artificial Sequence
  Chr8_2 Forward Primer
aattcagtcctgtgggttgg

SEQ ID NO: 8521 - DNA, 20 bp, Artificial Sequence
  Chr8_2 Forward Primer
acactgaccactgccctctt

SEQ ID NO: 8522 - DNA, 20 bp, Artificial Sequence
  Chr8_2 Forward Primer
aggattatggaaatgagcca

SEQ ID NO: 8523 - DNA, 20 bp, Artificial Sequence
  Chr8_2 Forward Primer
accagcatatgattccgctc

SEQ ID NO: 8524 - DNA, 20 bp, Artificial Sequence
  Chr8_2 Forward Primer
ttgattctggaggaaatggg

SEQ ID NO: 8525 - DNA, 25 bp, Artificial Sequence
  Chr8_2 Forward Primer
cacagattctaaaactgatgtccaa

SEQ ID NO: 8526 - DNA, 20 bp, Artificial Sequence
  Chr8_2 Forward Primer
aaggcctctttcagttgctg

SEQ ID NO: 8527 - DNA, 20 bp, Artificial Sequence
  Chr8_2 Forward Primer
tgtcaaacagcatcatgcaa

SEQ ID NO: 8528 - DNA, 20 bp, Artificial Sequence
  Chr8_2 Forward Primer
acggcagcagtgaaagaagt

SEQ ID NO: 8529 - DNA, 22 bp, Artificial Sequence
  Chr8_2 Forward Primer
ctctttgttccctaactccttg

SEQ ID NO: 8530 - DNA, 20 bp, Artificial Sequence
  Chr8_2 Forward Primer
aggtctgccttccacgtaaa

SEQ ID NO: 8531 - DNA, 24 bp, Artificial Sequence
  Chr8_2 Forward Primer
ttgaaatcgacaaaatttcaaaag

SEQ ID NO: 8532 - DNA, 20 bp, Artificial Sequence
  Chr8_2 Forward Primer
atttccaactgcctgccata

SEQ ID NO: 8533 - DNA, 20 bp, Artificial Sequence
  Chr8_2 Forward Primer
actgccccatgtacaccatt

SEQ ID NO: 8534 - DNA, 20 bp, Artificial Sequence
  Chr8_2 Forward Primer
tatatgcagcttgcccatga

SEQ ID NO: 8535 - DNA, 20 bp, Artificial Sequence
  Chr8_2 Forward Primer
agatgtttgaactccctccg

SEQ ID NO: 8536 - DNA, 24 bp, Artificial Sequence
  Chr8_2 Forward Primer
tcatggttttctatctttgttcca

SEQ ID NO: 8537 - DNA, 20 bp, Artificial Sequence
  Chr8_2 Forward Primer
acacattctgccaacccttc

SEQ ID NO: 8538 - DNA, 22 bp, Artificial Sequence
  Chr8_2 Forward Primer
cgaaattttcaaaggctaacca

SEQ ID NO: 8539 - DNA, 24 bp, Artificial Sequence
  Chr8_2 Forward Primer
aactgctgtgaggattgaataaga

SEQ ID NO: 8540 - DNA, 20 bp, Artificial Sequence
  Chr8_2 Forward Primer
agacagcacaaaggtgggtc

SEQ ID NO: 8541 - DNA, 22 bp, Artificial Sequence
  Chr8_2 Forward Primer
tgaaatgggacacttgaatcag

SEQ ID NO: 8542 - DNA, 24 bp, Artificial Sequence
  Chr8_2 Forward Primer
caaactctacaaggacagggactt

SEQ ID NO: 8543 - DNA, 21 bp, Artificial Sequence
  Chr8_2 Forward Primer
tcacccaaaattcttgcaact

SEQ ID NO: 8544 - DNA, 23 bp, Artificial Sequence
  Chr8_2 Forward Primer
cgtacatgaaagtggtctctcaa

SEQ ID NO: 8545 - DNA, 24 bp, Artificial Sequence
  Chr8_2 Forward Primer
tttattgatgaatgctaaactgct

SEQ ID NO: 8546 - DNA, 20 bp, Artificial Sequence
  Chr8_2 Forward Primer
gcctggtcaagcattacaga

SEQ ID NO: 8547 - DNA, 20 bp, Artificial Sequence
  Chr8_2 Forward Primer
aagctttcttttgctgctgg

SEQ ID NO: 8548 - DNA, 20 bp, Artificial Sequence
  Chr8_2 Forward Primer
aaatcggccctttaccaact

SEQ ID NO: 8549 - DNA, 20 bp, Artificial Sequence
  Chr8_2 Forward Primer
ttgctaagtgggcaaaatcc

SEQ ID NO: 8550 - DNA, 20 bp, Artificial Sequence
  Chr8_2 Forward Primer
gtgtgacggtgtgcaagtct

SEQ ID NO: 8551 - DNA, 20 bp, Artificial Sequence
  Chr8_2 Forward Primer
ggacaaaagatgacccgaaa

SEQ ID NO: 8552 - DNA, 20 bp, Artificial Sequence
  Chr8_2 Forward Primer
gcctctcccactagatgtcg

SEQ ID NO: 8553 - DNA, 20 bp, Artificial Sequence
  Chr8_2 Forward Primer
cctataaggcctttccccac

SEQ ID NO: 8554 - DNA, 20 bp, Artificial Sequence
  Chr8_2 Forward Primer
gcttatgcaattctgccctc

SEQ ID NO: 8555 - DNA, 20 bp, Artificial Sequence
  Chr8_2 Forward Primer
aagcagaggagactctcggg

SEQ ID NO: 8556 - DNA, 20 bp, Artificial Sequence
  Chr8_2 Forward Primer
gttctgaagtctgaagcggc

SEQ ID NO: 8557 - DNA, 20 bp, Artificial Sequence
  Chr8_2 Forward Primer
agttgaacaccaggcagtcc

SEQ ID NO: 8558 - DNA, 18 bp, Artificial Sequence
  Chr8_2 Forward Primer
gagcttcagtccccgctt

SEQ ID NO: 8559 - DNA, 20 bp, Artificial Sequence
  Chr8_2 Forward Primer
tgactgggactcttcggttc

SEQ ID NO: 8560 - DNA, 20 bp, Artificial Sequence
  Chr8_2 Forward Primer
ctacaacccaagctggctct

SEQ ID NO: 8561 - DNA, 20 bp, Artificial Sequence
  Chr8_2 Reverse Primer
gcttatggtttggtggcatt

SEQ ID NO: 8562 - DNA, 20 bp, Artificial Sequence
  Chr8_2 Reverse Primer
tgctgccctagaaacttttg

SEQ ID NO: 8563 - DNA, 21 bp, Artificial Sequence
  Chr8_2 Reverse Primer
gcttttcacattaactgccca

SEQ ID NO: 8564 - DNA, 21 bp, Artificial Sequence
  Chr8_2 Reverse Primer
gggtcatttattgcccaagtt

SEQ ID NO: 8565 - DNA, 20 bp, Artificial Sequence
  Chr8_2 Reverse Primer
ttttccttcgacctcctgaa

SEQ ID NO: 8566 - DNA, 20 bp, Artificial Sequence
  Chr8_2 Reverse Primer
gtggcttcttgcagttctcc

SEQ ID NO: 8567 - DNA, 20 bp, Artificial Sequence
  Chr8_2 Reverse Primer
gtagcctgaggtcgagaagc

SEQ ID NO: 8568 - DNA, 20 bp, Artificial Sequence
  Chr8_2 Reverse Primer
agccctcacagcattaccag

SEQ ID NO: 8569 - DNA, 20 bp, Artificial Sequence
  Chr8_2 Reverse Primer
tctcttccagcttccacacc

SEQ ID NO: 8570 - DNA, 20 bp, Artificial Sequence
  Chr8_2 Reverse Primer
ttcccagaatgaagggtttg

SEQ ID NO: 8571 - DNA, 20 bp, Artificial Sequence
  Chr8_2 Reverse Primer
ccaacattaggccatctcca

SEQ ID NO: 8572 - DNA, 20 bp, Artificial Sequence
  Chr8_2 Reverse Primer
atctcccaacatttgaccca

SEQ ID NO: 8573 - DNA, 20 bp, Artificial Sequence
  Chr8_2 Reverse Primer
cccacctcatctttgcaatc

SEQ ID NO: 8574 - DNA, 20 bp, Artificial Sequence
  Chr8_2 Reverse Primer
gacgggggattagacacaga

SEQ ID NO: 8575 - DNA, 20 bp, Artificial Sequence
  Chr8_2 Reverse Primer
actcttcccacttgagggct

SEQ ID NO: 8576 - DNA, 20 bp, Artificial Sequence
  Chr8_2 Reverse Primer
tgcagtttggtgacccagta

SEQ ID NO: 8577 - DNA, 21 bp, Artificial Sequence
  Chr8_2 Reverse Primer
tcgaaatgttttcagagtccc

SEQ ID NO: 8578 - DNA, 20 bp, Artificial Sequence
  Chr8_2 Reverse Primer
tctttggtcctcggaatgtc

SEQ ID NO: 8579 - DNA, 20 bp, Artificial Sequence
  Chr8_2 Reverse Primer
tgggggtactttgtcttgtg

SEQ ID NO: 8580 - DNA, 20 bp, Artificial Sequence
  Chr8_2 Reverse Primer
cccttcatttcgtcagcatt

SEQ ID NO: 8581 - DNA, 20 bp, Artificial Sequence
  Chr8_2 Reverse Primer
ctggggcagacatagaaagc

SEQ ID NO: 8582 - DNA, 20 bp, Artificial Sequence
  Chr8_2 Reverse Primer
ttctgcaggcttaacaacca

SEQ ID NO: 8583 - DNA, 20 bp, Artificial Sequence
  Chr8_2 Reverse Primer
acgtgcatttcttaccggac

SEQ ID NO: 8584 - DNA, 21 bp, Artificial Sequence
  Chr8_2 Reverse Primer
cctctccatgtatttgagcca

SEQ ID NO: 8585 - DNA, 20 bp, Artificial Sequence
  Chr8_2 Reverse Primer
ggggtgctgattcttgttct

SEQ ID NO: 8586 - DNA, 22 bp, Artificial Sequence
  Chr8_2 Reverse Primer
tgtgggagttcactttttcttg

SEQ ID NO: 8587 - DNA, 20 bp, Artificial Sequence
  Chr8_2 Reverse Primer
tgttctttagcgtgcctgtg

SEQ ID NO: 8588 - DNA, 21 bp, Artificial Sequence
  Chr8_2 Reverse Primer
aggctttaaacaaagatggga

SEQ ID NO: 8589 - DNA, 20 bp, Artificial Sequence
  Chr8_2 Reverse Primer
gagacacacagagagctgcg

SEQ ID NO: 8590 - DNA, 20 bp, Artificial Sequence
  Chr8_2 Reverse Primer
ggtgccttccacagaagaaa

SEQ ID NO: 8591 - DNA, 20 bp, Artificial Sequence
  Chr8_2 Reverse Primer
tgactgggagcacaactgag

SEQ ID NO: 8592 - DNA, 20 bp, Artificial Sequence
  Chr8_2 Reverse Primer
cgtggtcctcaacagacaga

SEQ ID NO: 8593 - DNA, 23 bp, Artificial Sequence
  Chr8_2 Reverse Primer
agcagataggaggtactgtgtca

SEQ ID NO: 8594 - DNA, 20 bp, Artificial Sequence
  Chr8_2 Reverse Primer
tacagggcttggttcaggtt

SEQ ID NO: 8595 - DNA, 20 bp, Artificial Sequence
  Chr8_2 Reverse Primer
tgggttcttgggagagaaaa

SEQ ID NO: 8596 - DNA, 20 bp, Artificial Sequence
  Chr8_2 Reverse Primer
tcgcatttccccatctactc

SEQ ID NO: 8597 - DNA, 20 bp, Artificial Sequence
  Chr8_2 Reverse Primer
accaattgttggattgcctc

SEQ ID NO: 8598 - DNA, 21 bp, Artificial Sequence
  Chr8_2 Reverse Primer
ggctaaagcctgtgattctga

SEQ ID NO: 8599 - DNA, 20 bp, Artificial Sequence
  Chr8_2 Reverse Primer
acatgtgactaatggctgcg

SEQ ID NO: 8600 - DNA, 20 bp, Artificial Sequence
  Chr8_2 Reverse Primer
gtgaggttgaagaggatggg

SEQ ID NO: 8601 - DNA, 20 bp, Artificial Sequence
  Chr8_2 Reverse Primer
tttctctcctctcctgcctg

SEQ ID NO: 8602 - DNA, 20 bp, Artificial Sequence
  Chr8_2 Reverse Primer
atgccttgggcaaataactg

SEQ ID NO: 8603 - DNA, 23 bp, Artificial Sequence
  Chr8_2 Reverse Primer
atgttttccttagcttatggtga

SEQ ID NO: 8604 - DNA, 24 bp, Artificial Sequence
  Chr8_2 Reverse Primer
ttctgtcagttcaagaaaaaggtg

SEQ ID NO: 8605 - DNA, 20 bp, Artificial Sequence
  Chr8_2 Reverse Primer
aactgtgctggcaaaaatca

SEQ ID NO: 8606 - DNA, 20 bp, Artificial Sequence
  Chr8_2 Reverse Primer
caggtacggggtgagacaag

SEQ ID NO: 8607 - DNA, 20 bp, Artificial Sequence
  Chr8_2 Reverse Primer
tgttgcttaccttgttcccc

SEQ ID NO: 8608 - DNA, 20 bp, Artificial Sequence
  Chr8_2 Reverse Primer
ttcacataagtgccccaagg

SEQ ID NO: 8609 - DNA, 20 bp, Artificial Sequence
  Chr8_2 Reverse Primer
cagctgaaaaaccgaacctc

SEQ ID NO: 8610 - DNA, 23 bp, Artificial Sequence
  Chr8_2 Reverse Primer
agcccactgatttaagaagaaaa

SEQ ID NO: 8611 - DNA, 20 bp, Artificial Sequence
  Chr8_2 Reverse Primer
ttgtcagaatcatgtgggga

SEQ ID NO: 8612 - DNA, 20 bp, Artificial Sequence
  Chr8_2 Reverse Primer
ttgggaagcattgggttaag

SEQ ID NO: 8613 - DNA, 20 bp, Artificial Sequence
  Chr8_2 Reverse Primer
gatgttcctgctcagaagcc

SEQ ID NO: 8614 - DNA, 20 bp, Artificial Sequence
  Chr8_2 Reverse Primer
gcccttgatgaagattttgc

SEQ ID NO: 8615 - DNA, 23 bp, Artificial Sequence
  Chr8_2 Reverse Primer
ggaagaaatttaccatactgccc

SEQ ID NO: 8616 - DNA, 20 bp, Artificial Sequence
  Chr8_2 Reverse Primer
ggaatcttttggatttgcca

SEQ ID NO: 8617 - DNA, 22 bp, Artificial Sequence
  Chr8_2 Reverse Primer
tgtcaaggcaaattagtccaaa

SEQ ID NO: 8618 - DNA, 22 bp, Artificial Sequence
  Chr8_2 Reverse Primer
tgcagttctttttcaacttcca

SEQ ID NO: 8619 - DNA, 20 bp, Artificial Sequence
  Chr8_2 Reverse Primer
tgcctatactgcctttggct

SEQ ID NO: 8620 - DNA, 22 bp, Artificial Sequence
  Chr8_2 Reverse Primer
tgaaattctgaatgccatagga

SEQ ID NO: 8621 - DNA, 21 bp, Artificial Sequence
  Chr8_2 Reverse Primer
aactagagtaaacccggcagc

SEQ ID NO: 8622 - DNA, 27 bp, Artificial Sequence
  Chr8_2 Reverse Primer
ttaattcttatgcattttgttcagaga

SEQ ID NO: 8623 - DNA, 20 bp, Artificial Sequence
  Chr8_2 Reverse Primer
agcggagtctgtctcaagga

SEQ ID NO: 8624 - DNA, 20 bp, Artificial Sequence
  Chr8_2 Reverse Primer
cttagggcgtgcatcttctc

SEQ ID NO: 8625 - DNA, 20 bp, Artificial Sequence
  Chr8_2 Reverse Primer
tatgcttttcaaaggggctc

SEQ ID NO: 8626 - DNA, 20 bp, Artificial Sequence
  Chr8_2 Reverse Primer
cacttgctgggcaatacaga

SEQ ID NO: 8627 - DNA, 24 bp, Artificial Sequence
  Chr8_2 Reverse Primer
gatcagggagttaaatcatgacaa

SEQ ID NO: 8628 - DNA, 20 bp, Artificial Sequence
  Chr8_2 Reverse Primer
gagatttggggagcctaacc

SEQ ID NO: 8629 - DNA, 20 bp, Artificial Sequence
  Chr8_2 Reverse Primer
cacagtgagtgggtggaaga

SEQ ID NO: 8630 - DNA, 20 bp, Artificial Sequence
  Chr8_2 Reverse Primer
taatagcaaacacgccatgc

SEQ ID NO: 8631 - DNA, 20 bp, Artificial Sequence
  Chr8_2 Reverse Primer
gattcctcagatggtggagc

SEQ ID NO: 8632 - DNA, 21 bp, Artificial Sequence
  Chr8_2 Reverse Primer
ccaacactggctatttctttg

SEQ ID NO: 8633 - DNA, 24 bp, Artificial Sequence
  Chr8_2 Reverse Primer
cactcagaaaaatgagaaaaggaa

SEQ ID NO: 8634 - DNA, 20 bp, Artificial Sequence
  Chr8_2 Reverse Primer
aggggatctgaacccaattt

SEQ ID NO: 8635 - DNA, 23 bp, Artificial Sequence
  Chr8_2 Reverse Primer
ggctaccatttatgtgggtaaaa

SEQ ID NO: 8636 - DNA, 20 bp, Artificial Sequence
  Chr8_2 Reverse Primer
aagagccttggaaaatctcg

SEQ ID NO: 8637 - DNA, 20 bp, Artificial Sequence
  Chr8_2 Reverse Primer
gcagcaaattgaaaatccct

SEQ ID NO: 8638 - DNA, 21 bp, Artificial Sequence
  Chr8_2 Reverse Primer
aaactgaaagcagaacccaaa

SEQ ID NO: 8639 - DNA, 20 bp, Artificial Sequence
  Chr8_2 Reverse Primer
ttgggtaaagggaggctctt

SEQ ID NO: 8640 - DNA, 26 bp, Artificial Sequence
  Chr8_2 Reverse Primer
gctttagctatcagaagatcagtcaa

SEQ ID NO: 8641 - DNA, 21 bp, Artificial Sequence
  Chr8_2 Reverse Primer
gcctgacacagagtaaatgcc

SEQ ID NO: 8642 - DNA, 20 bp, Artificial Sequence
  Chr8_2 Reverse Primer
ctgcctgccttttgtgttta

SEQ ID NO: 8643 - DNA, 20 bp, Artificial Sequence
  Chr8_2 Reverse Primer
attggcaagctaggcatttg

SEQ ID NO: 8644 - DNA, 23 bp, Artificial Sequence
  Chr8_2 Reverse Primer
gaacccaagtcttctgactttca

SEQ ID NO: 8645 - DNA, 20 bp, Artificial Sequence
  Chr8_2 Reverse Primer
cctggtccatggaagaacag

SEQ ID NO: 8646 - DNA, 20 bp, Artificial Sequence
  Chr8_2 Reverse Primer
ttcgtgaggagtaggcaggt

SEQ ID NO: 8647 - DNA, 20 bp, Artificial Sequence
  Chr8_2 Reverse Primer
caaagaattatcaggcccca

SEQ ID NO: 8648 - DNA, 20 bp, Artificial Sequence
  Chr8_2 Reverse Primer
taaggtggttttaggcgctg

SEQ ID NO: 8649 - DNA, 20 bp, Artificial Sequence
  Chr8_2 Reverse Primer
tcccttgctacctggaaatg

SEQ ID NO: 8650 - DNA, 20 bp, Artificial Sequence
  Chr8_2 Reverse Primer
atgggtggtagctgggctat

SEQ ID NO: 8651 - DNA, 18 bp, Artificial Sequence
  Chr8_2 Reverse Primer
gagaagtggtttccgggc

SEQ ID NO: 8652 - DNA, 18 bp, Artificial Sequence
  Chr8_2 Reverse Primer
tcctcagatgcctgggct

SEQ ID NO: 8653 - DNA, 18 bp, Artificial Sequence
  Chr8_2 Reverse Primer
aggccggttctgggaagt

SEQ ID NO: 8654 - DNA, 20 bp, Artificial Sequence
  Chr8_2 Reverse Primer
ctatgaaaatgcagacccgc

SEQ ID NO: 8655 - DNA, 20 bp, Artificial Sequence
  Chr8_2 Reverse Primer
cagtgcttgaggtgtggaga

SEQ ID NO: 8656 - DNA, 21 bp, Artificial Sequence
  Chr8_2 Reverse Primer
tccctgtgtttccaatcattt

SEQ ID NO: 8657 - DNA, 20 bp, Artificial Sequence
  Chr8_3 Forward Primer
ctcagctcccacactccttc

SEQ ID NO: 8658 - DNA, 20 bp, Artificial Sequence
  Chr8_3 Forward Primer
aaagaaggcaaacgttgctg

SEQ ID NO: 8659 - DNA, 20 bp, Artificial Sequence
  Chr8_3 Forward Primer
acaggagaaacttccccgag

SEQ ID NO: 8660 - DNA, 20 bp, Artificial Sequence
  Chr8_3 Forward Primer
gagcagctgaaagggacatc

SEQ ID NO: 8661 - DNA, 20 bp, Artificial Sequence
  Chr8_3 Forward Primer
ccaattccactgggttgcta

SEQ ID NO: 8662 - DNA, 20 bp, Artificial Sequence
  Chr8_3 Forward Primer
cctctcccaagcacaggata

SEQ ID NO: 8663 - DNA, 20 bp, Artificial Sequence
  Chr8_3 Forward Primer
tgttatccaggctccagacc

SEQ ID NO: 8664 - DNA, 20 bp, Artificial Sequence
  Chr8_3 Forward Primer
cacaaggccacaaaaggatt

SEQ ID NO: 8665 - DNA, 20 bp, Artificial Sequence
  Chr8_3 Forward Primer
agctgggaaagagcaaaaca

SEQ ID NO: 8666 - DNA, 20 bp, Artificial Sequence
  Chr8_3 Forward Primer
gacggcaggaaagactcaag

SEQ ID NO: 8667 - DNA, 19 bp, Artificial Sequence
  Chr8_3 Forward Primer
ccaggctccgttttcaatg

SEQ ID NO: 8668 - DNA, 20 bp, Artificial Sequence
  Chr8_3 Forward Primer
gtccactgaaaggcagtgct

SEQ ID NO: 8669 - DNA, 20 bp, Artificial Sequence
  Chr8_3 Forward Primer
aggtcttctgtccatgggtg

SEQ ID NO: 8670 - DNA, 20 bp, Artificial Sequence
  Chr8_3 Forward Primer
gggcgtgtgagtgtgtaatg

SEQ ID NO: 8671 - DNA, 20 bp, Artificial Sequence
  Chr8_3 Forward Primer
atgggaaaggctgcagagta

SEQ ID NO: 8672 - DNA, 20 bp, Artificial Sequence
  Chr8_3 Forward Primer
cctaggcactgagatccacc

SEQ ID NO: 8673 - DNA, 20 bp, Artificial Sequence
  Chr8_3 Forward Primer
aagtgtttcacagcttgggc

SEQ ID NO: 8674 - DNA, 20 bp, Artificial Sequence
  Chr8_3 Forward Primer
ggtaaatgtaagagccgcca

SEQ ID NO: 8675 - DNA, 20 bp, Artificial Sequence
  Chr8_3 Forward Primer
cacccttgttccacccataa

SEQ ID NO: 8676 - DNA, 20 bp, Artificial Sequence
  Chr8_3 Forward Primer
tgcatcacagtgcatgaaaa

SEQ ID NO: 8677 - DNA, 20 bp, Artificial Sequence
  Chr8_3 Forward Primer
cagatgctaatgacccccat

SEQ ID NO: 8678 - DNA, 20 bp, Artificial Sequence
  Chr8_3 Forward Primer
ccacacctagcctttttcca

SEQ ID NO: 8679 - DNA, 20 bp, Artificial Sequence
  Chr8_3 Forward Primer
ctgccaaaacactctttcca

SEQ ID NO: 8680 - DNA, 20 bp, Artificial Sequence
  Chr8_3 Forward Primer
tacattggcctcttcccaaa

SEQ ID NO: 8681 - DNA, 20 bp, Artificial Sequence
  Chr8_3 Forward Primer
tggagtagaggaagggctca

SEQ ID NO: 8682 - DNA, 20 bp, Artificial Sequence
  Chr8_3 Forward Primer
ctccaccaaccacttcacct

SEQ ID NO: 8683 - DNA, 20 bp, Artificial Sequence
  Chr8_3 Forward Primer
ccttgctgacttctttggct

SEQ ID NO: 8684 - DNA, 20 bp, Artificial Sequence
  Chr8_3 Forward Primer
actccacctcctcacctcct

SEQ ID NO: 8685 - DNA, 20 bp, Artificial Sequence
  Chr8_3 Forward Primer
cttgagtcctcggaaggtga

SEQ ID NO: 8686 - DNA, 20 bp, Artificial Sequence
  Chr8_3 Forward Primer
gaaacgaccttctgctcagg

SEQ ID NO: 8687 - DNA, 19 bp, Artificial Sequence
  Chr8_3 Forward Primer
agacatgactgccctgctg

SEQ ID NO: 8688 - DNA, 20 bp, Artificial Sequence
  Chr8_3 Forward Primer
gtctctaagatggccccaca

SEQ ID NO: 8689 - DNA, 20 bp, Artificial Sequence
  Chr8_3 Forward Primer
gctccatcctggatctctga

SEQ ID NO: 8690 - DNA, 20 bp, Artificial Sequence
  Chr8_3 Forward Primer
gtcctcccctattgcctctt

SEQ ID NO: 8691 - DNA, 20 bp, Artificial Sequence
  Chr8_3 Forward Primer
cattctcatcctgctctggc

SEQ ID NO: 8692 - DNA, 20 bp, Artificial Sequence
  Chr8_3 Forward Primer
ttctcctgtcctctcccaga

SEQ ID NO: 8693 - DNA, 20 bp, Artificial Sequence
  Chr8_3 Forward Primer
gtgtgagcttgtgcttgtgc

SEQ ID NO: 8694 - DNA, 20 bp, Artificial Sequence
  Chr8_3 Forward Primer
cctggaggagtctgaagtgc

SEQ ID NO: 8695 - DNA, 20 bp, Artificial Sequence
  Chr8_3 Forward Primer
tgctatcgcaagtgctctgt

SEQ ID NO: 8696 - DNA, 20 bp, Artificial Sequence
  Chr8_3 Forward Primer
gcggaggatgactgtcctaa

SEQ ID NO: 8697 - DNA, 20 bp, Artificial Sequence
  Chr8_3 Forward Primer
agcagtgagggtagggaggt

SEQ ID NO: 8698 - DNA, 20 bp, Artificial Sequence
  Chr8_3 Forward Primer
ggtgagtctgggctgtgttc

SEQ ID NO: 8699 - DNA, 20 bp, Artificial Sequence
  Chr8_3 Forward Primer
aaggcatggactattgaccg

SEQ ID NO: 8700 - DNA, 20 bp, Artificial Sequence
  Chr8_3 Forward Primer
gccaaaaagtgagaaggctg

SEQ ID NO: 8701 - DNA, 20 bp, Artificial Sequence
  Chr8_3 Forward Primer
ccaaggaccagaaagagcag

SEQ ID NO: 8702 - DNA, 20 bp, Artificial Sequence
  Chr8_3 Forward Primer
atcaatcccaatgttgccag

SEQ ID NO: 8703 - DNA, 20 bp, Artificial Sequence
  Chr8_3 Forward Primer
agcaaacacttccctccctt

SEQ ID NO: 8704 - DNA, 20 bp, Artificial Sequence
  Chr8_3 Forward Primer
cccaaagtcattggcagatt

SEQ ID NO: 8705 - DNA, 20 bp, Artificial Sequence
  Chr8_3 Forward Primer
gggcagaagaaagcagtgtc

SEQ ID NO: 8706 - DNA, 20 bp, Artificial Sequence
  Chr8_3 Forward Primer
cttgggcagagtcctctcag

SEQ ID NO: 8707 - DNA, 20 bp, Artificial Sequence
  Chr8_3 Forward Primer
aagaggactcatgtgccagg

SEQ ID NO: 8708 - DNA, 20 bp, Artificial Sequence
  Chr8_3 Forward Primer
taagtcaggatggggacacc

SEQ ID NO: 8709 - DNA, 20 bp, Artificial Sequence
  Chr8_3 Forward Primer
cagggagagacaggtgaagc

SEQ ID NO: 8710 - DNA, 20 bp, Artificial Sequence
  Chr8_3 Forward Primer
atgacctcatgcctgtctcc

SEQ ID NO: 8711 - DNA, 20 bp, Artificial Sequence
  Chr8_3 Forward Primer
cactcagcctccctgaactc

SEQ ID NO: 8712 - DNA, 20 bp, Artificial Sequence
  Chr8_3 Forward Primer
accaatgacaaggctctgct

SEQ ID NO: 8713 - DNA, 20 bp, Artificial Sequence
  Chr8_3 Forward Primer
atccccagtcttgaggctct

SEQ ID NO: 8714 - DNA, 20 bp, Artificial Sequence
  Chr8_3 Forward Primer
cgaggtgccgctctactaca

SEQ ID NO: 8715 - DNA, 20 bp, Artificial Sequence
  Chr8_3 Forward Primer
tttgcttcacagggtcagtg

SEQ ID NO: 8716 - DNA, 19 bp, Artificial Sequence
  Chr8_3 Forward Primer
aaagtggggtttgccattc

SEQ ID NO: 8717 - DNA, 20 bp, Artificial Sequence
  Chr8_3 Forward Primer
ctacacctatgacctggcgg

SEQ ID NO: 8718 - DNA, 20 bp, Artificial Sequence
  Chr8_3 Forward Primer
tgagtctccaaggagcaggt

SEQ ID NO: 8719 - DNA, 20 bp, Artificial Sequence
  Chr8_3 Forward Primer
atatcagctctgtcaccccc

SEQ ID NO: 8720 - DNA, 20 bp, Artificial Sequence
  Chr8_3 Forward Primer
ctccaaatagccagagccag

SEQ ID NO: 8721 - DNA, 20 bp, Artificial Sequence
  Chr8_3 Forward Primer
ggcaggcacatctagctttc

SEQ ID NO: 8722 - DNA, 20 bp, Artificial Sequence
  Chr8_3 Forward Primer
agtgccacattggagggtag

SEQ ID NO: 8723 - DNA, 20 bp, Artificial Sequence
  Chr8_3 Forward Primer
ttggagcttcaagtaagggc

SEQ ID NO: 8724 - DNA, 20 bp, Artificial Sequence
  Chr8_3 Forward Primer
caggtccctcagctctgttc

SEQ ID NO: 8725 - DNA, 20 bp, Artificial Sequence
  Chr8_3 Forward Primer
aatcagccaaaccatgaagg

SEQ ID NO: 8726 - DNA, 20 bp, Artificial Sequence
  Chr8_3 Forward Primer
agcacttaccagcccacatc

SEQ ID NO: 8727 - DNA, 20 bp, Artificial Sequence
  Chr8_3 Forward Primer
gtgcatccctgtccatttct

SEQ ID NO: 8728 - DNA, 20 bp, Artificial Sequence
  Chr8_3 Forward Primer
gtttgcaggggtttgagtgt

SEQ ID NO: 8729 - DNA, 20 bp, Artificial Sequence
  Chr8_3 Forward Primer
tactaccctgaccgtgaccc

SEQ ID NO: 8730 - DNA, 20 bp, Artificial Sequence
  Chr8_3 Forward Primer
gctgactttgagcttacggg

SEQ ID NO: 8731 - DNA, 20 bp, Artificial Sequence
  Chr8_3 Forward Primer
actggctggtgaccttgagt

SEQ ID NO: 8732 - DNA, 20 bp, Artificial Sequence
  Chr8_3 Forward Primer
aggtgagggtgtgtctctgg

SEQ ID NO: 8733 - DNA, 20 bp, Artificial Sequence
  Chr8_3 Forward Primer
actggggaggagaaacctgt

SEQ ID NO: 8734 - DNA, 19 bp, Artificial Sequence
  Chr8_3 Forward Primer
acagttcagccgggtctct

SEQ ID NO: 8735 - DNA, 20 bp, Artificial Sequence
  Chr8_3 Forward Primer
gggctgagcatcagctttac

SEQ ID NO: 8736 - DNA, 20 bp, Artificial Sequence
  Chr8_3 Forward Primer
ctggacgaagaggacctgag

SEQ ID NO: 8737 - DNA, 20 bp, Artificial Sequence
  Chr8_3 Forward Primer
atcccttccccagaggagta

SEQ ID NO: 8738 - DNA, 20 bp, Artificial Sequence
  Chr8_3 Forward Primer
agagctgggactggaactca

SEQ ID NO: 8739 - DNA, 21 bp, Artificial Sequence
  Chr8_3 Forward Primer
ggatttgctcctatgtctccc

SEQ ID NO: 8740 - DNA, 20 bp, Artificial Sequence
  Chr8_3 Forward Primer
aggtatggcacaacggaaag

SEQ ID NO: 8741 - DNA, 20 bp, Artificial Sequence
  Chr8_3 Forward Primer
agaggtagatcccgtagccg

SEQ ID NO: 8742 - DNA, 20 bp, Artificial Sequence
  Chr8_3 Forward Primer
ggagaagcacacctgtgtca

SEQ ID NO: 8743 - DNA, 19 bp, Artificial Sequence
  Chr8_3 Forward Primer
gtgacctccagcacacagc

SEQ ID NO: 8744 - DNA, 20 bp, Artificial Sequence
  Chr8_3 Forward Primer
gtgagaacatccagccaggt

SEQ ID NO: 8745 - DNA, 20 bp, Artificial Sequence
  Chr8_3 Forward Primer
cactatctgccctctgcctg

SEQ ID NO: 8746 - DNA, 20 bp, Artificial Sequence
  Chr8_3 Forward Primer
cctcaggtagggggactctc

SEQ ID NO: 8747 - DNA, 20 bp, Artificial Sequence
  Chr8_3 Forward Primer
gcagtgacccaggaaaagag

SEQ ID NO: 8748 - DNA, 20 bp, Artificial Sequence
  Chr8_3 Forward Primer
cccccaagattctccttagc

SEQ ID NO: 8749 - DNA, 20 bp, Artificial Sequence
  Chr8_3 Forward Primer
agtgcaaacacccaggattc

SEQ ID NO: 8750 - DNA, 20 bp, Artificial Sequence
  Chr8_3 Forward Primer
taggggcctgtagctttcct

SEQ ID NO: 8751 - DNA, 20 bp, Artificial Sequence
  Chr8_3 Forward Primer
ttcctggataccattgtccc

SEQ ID NO: 8752 - DNA, 18 bp, Artificial Sequence
  Chr8_3 Forward Primer
gaggggaccccataggag

SEQ ID NO: 8753 - DNA, 20 bp, Artificial Sequence
  Chr8_3 Reverse Primer
accactgggtgataccagga

SEQ ID NO: 8754 - DNA, 20 bp, Artificial Sequence
  Chr8_3 Reverse Primer
tagctggtgggggttaactg

SEQ ID NO: 8755 - DNA, 20 bp, Artificial Sequence
  Chr8_3 Reverse Primer
agggagacccaggacacttt

SEQ ID NO: 8756 - DNA, 20 bp, Artificial Sequence
  Chr8_3 Reverse Primer
tctccatacgggagaccatc

SEQ ID NO: 8757 - DNA, 20 bp, Artificial Sequence
  Chr8_3 Reverse Primer
agtgggttgagtctcccaga

SEQ ID NO: 8758 - DNA, 20 bp, Artificial Sequence
  Chr8_3 Reverse Primer
ttcctcacccatcctcagtc

SEQ ID NO: 8759 - DNA, 20 bp, Artificial Sequence
  Chr8_3 Reverse Primer
acgggggaaatgatagatcc

SEQ ID NO: 8760 - DNA, 20 bp, Artificial Sequence
  Chr8_3 Reverse Primer
cagtcagggtccctcaacat

SEQ ID NO: 8761 - DNA, 20 bp, Artificial Sequence
  Chr8_3 Reverse Primer
gtccctcttcttttaccccg

SEQ ID NO: 8762 - DNA, 20 bp, Artificial Sequence
  Chr8_3 Reverse Primer
gaccttcttcctcccagctc

SEQ ID NO: 8763 - DNA, 20 bp, Artificial Sequence
  Chr8_3 Reverse Primer
ctagctgagcttctgctgcc

SEQ ID NO: 8764 - DNA, 20 bp, Artificial Sequence
  Chr8_3 Reverse Primer
gctttctcaggcttggactg

SEQ ID NO: 8765 - DNA, 20 bp, Artificial Sequence
  Chr8_3 Reverse Primer
cccggaactgataaggatga

SEQ ID NO: 8766 - DNA, 20 bp, Artificial Sequence
  Chr8_3 Reverse Primer
catcctcctgtccttgtgct

SEQ ID NO: 8767 - DNA, 20 bp, Artificial Sequence
  Chr8_3 Reverse Primer
accacgtatgcctgtgtgaa

SEQ ID NO: 8768 - DNA, 20 bp, Artificial Sequence
  Chr8_3 Reverse Primer
gggcagtgatttctccttca

SEQ ID NO: 8769 - DNA, 20 bp, Artificial Sequence
  Chr8_3 Reverse Primer
ggcaccagaatggcttctac

SEQ ID NO: 8770 - DNA, 20 bp, Artificial Sequence
  Chr8_3 Reverse Primer
gcgcagagtcttagtcctgg

SEQ ID NO: 8771 - DNA, 20 bp, Artificial Sequence
  Chr8_3 Reverse Primer
tggacaaaatcacagggtcc

SEQ ID NO: 8772 - DNA, 20 bp, Artificial Sequence
  Chr8_3 Reverse Primer
aactggggatgtcaaagtgg

SEQ ID NO: 8773 - DNA, 20 bp, Artificial Sequence
  Chr8_3 Reverse Primer
caggtttctggattgggaga

SEQ ID NO: 8774 - DNA, 20 bp, Artificial Sequence
  Chr8_3 Reverse Primer
acgaagtcaaggaggtgtgc

SEQ ID NO: 8775 - DNA, 20 bp, Artificial Sequence
  Chr8_3 Reverse Primer
ggggatacccaagctgagtc

SEQ ID NO: 8776 - DNA, 20 bp, Artificial Sequence
  Chr8_3 Reverse Primer
caccatcctgaagtgggact

SEQ ID NO: 8777 - DNA, 20 bp, Artificial Sequence
  Chr8_3 Reverse Primer
cccaaggcagctttacagac

SEQ ID NO: 8778 - DNA, 20 bp, Artificial Sequence
  Chr8_3 Reverse Primer
atccagccagagggaaactt

SEQ ID NO: 8779 - DNA, 20 bp, Artificial Sequence
  Chr8_3 Reverse Primer
taaagtccaatcagcgggag

SEQ ID NO: 8780 - DNA, 20 bp, Artificial Sequence
  Chr8_3 Reverse Primer
ataacctgcagacactgccc

SEQ ID NO: 8781 - DNA, 20 bp, Artificial Sequence
  Chr8_3 Reverse Primer
ctctatggcttggtgatgcc

SEQ ID NO: 8782 - DNA, 20 bp, Artificial Sequence
  Chr8_3 Reverse Primer
attggagacaacgccttcac

SEQ ID NO: 8783 - DNA, 20 bp, Artificial Sequence
  Chr8_3 Reverse Primer
aatgggacagaatgagggtg

SEQ ID NO: 8784 - DNA, 20 bp, Artificial Sequence
  Chr8_3 Reverse Primer
caggtgtcccttgcttttgt

SEQ ID NO: 8785 - DNA, 20 bp, Artificial Sequence
  Chr8_3 Reverse Primer
atttgggaggagaagggaaa

SEQ ID NO: 8786 - DNA, 20 bp, Artificial Sequence
  Chr8_3 Reverse Primer
tctgtgggaccagagaggtt

SEQ ID NO: 8787 - DNA, 20 bp, Artificial Sequence
  Chr8_3 Reverse Primer
agggagttctgcagttttgc

SEQ ID NO: 8788 - DNA, 20 bp, Artificial Sequence
  Chr8_3 Reverse Primer
ctgcaagtcagcgctaagag

SEQ ID NO: 8789 - DNA, 20 bp, Artificial Sequence
  Chr8_3 Reverse Primer
gcgtctgtcactcacgacat

SEQ ID NO: 8790 - DNA, 20 bp, Artificial Sequence
  Chr8_3 Reverse Primer
agacaaagggctggactgaa

SEQ ID NO: 8791 - DNA, 20 bp, Artificial Sequence
  Chr8_3 Reverse Primer
ccagggctacacttggaaga

SEQ ID NO: 8792 - DNA, 20 bp, Artificial Sequence
  Chr8_3 Reverse Primer
ctggctgggagaacacaact

SEQ ID NO: 8793 - DNA, 20 bp, Artificial Sequence
  Chr8_3 Reverse Primer
ttctgggttgactccctctg

SEQ ID NO: 8794 - DNA, 18 bp, Artificial Sequence
  Chr8_3 Reverse Primer
actggccagctctgggac

SEQ ID NO: 8795 - DNA, 20 bp, Artificial Sequence
  Chr8_3 Reverse Primer
agcacacatgaatgttccca

SEQ ID NO: 8796 - DNA, 20 bp, Artificial Sequence
  Chr8_3 Reverse Primer
ctgctgctgcttcttctcct

SEQ ID NO: 8797 - DNA, 20 bp, Artificial Sequence
  Chr8_3 Reverse Primer
actcacgagtactgggcctg

SEQ ID NO: 8798 - DNA, 20 bp, Artificial Sequence
  Chr8_3 Reverse Primer
ttgcctaagactccagcagc

SEQ ID NO: 8799 - DNA, 20 bp, Artificial Sequence
  Chr8_3 Reverse Primer
ctttaacatgccaccccagt

SEQ ID NO: 8800 - DNA, 20 bp, Artificial Sequence
  Chr8_3 Reverse Primer
gctcactcaccctgtggtct

SEQ ID NO: 8801 - DNA, 20 bp, Artificial Sequence
  Chr8_3 Reverse Primer
tttcccttaccttgcctcct

SEQ ID NO: 8802 - DNA, 20 bp, Artificial Sequence
  Chr8_3 Reverse Primer
ctcaccatgggtgtcttcct

SEQ ID NO: 8803 - DNA, 20 bp, Artificial Sequence
  Chr8_3 Reverse Primer
gcaggtgctatgctctcctc

SEQ ID NO: 8804 - DNA, 20 bp, Artificial Sequence
  Chr8_3 Reverse Primer
ggcgagctcctccttattct

SEQ ID NO: 8805 - DNA, 20 bp, Artificial Sequence
  Chr8_3 Reverse Primer
tacaagctgaacaccctccc

SEQ ID NO: 8806 - DNA, 20 bp, Artificial Sequence
  Chr8_3 Reverse Primer
atcccacacctctcaccatc

SEQ ID NO: 8807 - DNA, 20 bp, Artificial Sequence
  Chr8_3 Reverse Primer
ggagaaggtggcagtggtaa

SEQ ID NO: 8808 - DNA, 20 bp, Artificial Sequence
  Chr8_3 Reverse Primer
gtaggcgatcagcagctagg

SEQ ID NO: 8809 - DNA, 20 bp, Artificial Sequence
  Chr8_3 Reverse Primer
gaaggaaaggagtcgtgcag

SEQ ID NO: 8810 - DNA, 20 bp, Artificial Sequence
  Chr8_3 Reverse Primer
ggaagtaccggtctgtgagc

SEQ ID NO: 8811 - DNA, 21 bp, Artificial Sequence
  Chr8_3 Reverse Primer
gctgctttattctgttgtggc

SEQ ID NO: 8812 - DNA, 20 bp, Artificial Sequence
  Chr8_3 Reverse Primer
cgtctccctatctccccttc

SEQ ID NO: 8813 - DNA, 20 bp, Artificial Sequence
  Chr8_3 Reverse Primer
gttcttttgttccccactgc

SEQ ID NO: 8814 - DNA, 20 bp, Artificial Sequence
  Chr8_3 Reverse Primer
tgggcacatagggacaaagt

SEQ ID NO: 8815 - DNA, 20 bp, Artificial Sequence
  Chr8_3 Reverse Primer
ggtcatccaatcaggcaaat

SEQ ID NO: 8816 - DNA, 20 bp, Artificial Sequence
  Chr8_3 Reverse Primer
ccagcaggtgtagaggggta

SEQ ID NO: 8817 - DNA, 20 bp, Artificial Sequence
  Chr8_3 Reverse Primer
gcgctgactgtgtgttaagc

SEQ ID NO: 8818 - DNA, 20 bp, Artificial Sequence
  Chr8_3 Reverse Primer
tcccatttccaacaagaagg

SEQ ID NO: 8819 - DNA, 20 bp, Artificial Sequence
  Chr8_3 Reverse Primer
atgcccatgtgagtttcctc

SEQ ID NO: 8820 - DNA, 20 bp, Artificial Sequence
  Chr8_3 Reverse Primer
tggctaccctcagagcaact

SEQ ID NO: 8821 - DNA, 20 bp, Artificial Sequence
  Chr8_3 Reverse Primer
actggcacagggtcactacc

SEQ ID NO: 8822 - DNA, 20 bp, Artificial Sequence
  Chr8_3 Reverse Primer
gcggcactgaaataagaagg

SEQ ID NO: 8823 - DNA, 20 bp, Artificial Sequence
  Chr8_3 Reverse Primer
caggaagaccgatcacaggt

SEQ ID NO: 8824 - DNA, 20 bp, Artificial Sequence
  Chr8_3 Reverse Primer
ttgtgcctgggaagaatctc

SEQ ID NO: 8825 - DNA, 20 bp, Artificial Sequence
  Chr8_3 Reverse Primer
gagctcctggagtgaggatg

SEQ ID NO: 8826 - DNA, 20 bp, Artificial Sequence
  Chr8_3 Reverse Primer
cttggaatccaggttggcta

SEQ ID NO: 8827 - DNA, 20 bp, Artificial Sequence
  Chr8_3 Reverse Primer
ggcaaagtgctttcccatta

SEQ ID NO: 8828 - DNA, 20 bp, Artificial Sequence
  Chr8_3 Reverse Primer
cctacagacatatggtggcg

SEQ ID NO: 8829 - DNA, 20 bp, Artificial Sequence
  Chr8_3 Reverse Primer
gctttgtaaggcgctcagat

SEQ ID NO: 8830 - DNA, 20 bp, Artificial Sequence
  Chr8_3 Reverse Primer
gcatctttgggaaacgaaga

SEQ ID NO: 8831 - DNA, 20 bp, Artificial Sequence
  Chr8_3 Reverse Primer
aatcctcctacccagcccta

SEQ ID NO: 8832 - DNA, 19 bp, Artificial Sequence
  Chr8_3 Reverse Primer
catgtgctggggtcaaact

SEQ ID NO: 8833 - DNA, 20 bp, Artificial Sequence
  Chr8_3 Reverse Primer
tcctgggcaggtcactttac

SEQ ID NO: 8834 - DNA, 20 bp, Artificial Sequence
  Chr8_3 Reverse Primer
aggagggagaaaacagggaa

SEQ ID NO: 8835 - DNA, 20 bp, Artificial Sequence
  Chr8_3 Reverse Primer
tctcaaacatcagcactggc

SEQ ID NO: 8836 - DNA, 20 bp, Artificial Sequence
  Chr8_3 Reverse Primer
accttgacatttgtggagca

SEQ ID NO: 8837 - DNA, 20 bp, Artificial Sequence
  Chr8_3 Reverse Primer
gaaaggaatgtgtgggcact

SEQ ID NO: 8838 - DNA, 20 bp, Artificial Sequence
  Chr8_3 Reverse Primer
gtagatgccccatagcagga

SEQ ID NO: 8839 - DNA, 20 bp, Artificial Sequence
  Chr8_3 Reverse Primer
agttcttgccgatggagatg

SEQ ID NO: 8840 - DNA, 20 bp, Artificial Sequence
  Chr8_3 Reverse Primer
gatctgacacggaggaggaa

SEQ ID NO: 8841 - DNA, 20 bp, Artificial Sequence
  Chr8_3 Reverse Primer
caggaagagtcctgtccagc

SEQ ID NO: 8842 - DNA, 20 bp, Artificial Sequence
  Chr8_3 Reverse Primer
gcgtaatgcatgatgctgtc

SEQ ID NO: 8843 - DNA, 20 bp, Artificial Sequence
  Chr8_3 Reverse Primer
ctttgggctgatagtttggg

SEQ ID NO: 8844 - DNA, 20 bp, Artificial Sequence
  Chr8_3 Reverse Primer
accacccttccttggtctct

SEQ ID NO: 8845 - DNA, 20 bp, Artificial Sequence
  Chr8_3 Reverse Primer
gctgctccagccctaactaa

SEQ ID NO: 8846 - DNA, 20 bp, Artificial Sequence
  Chr8_3 Reverse Primer
gtggagtcgtctcaccctgt

SEQ ID NO: 8847 - DNA, 20 bp, Artificial Sequence
  Chr8_3 Reverse Primer
cagcctaagccttcttggtg

SEQ ID NO: 8848 - DNA, 20 bp, Artificial Sequence
  Chr8_3 Reverse Primer
aaggcaatatgggttccaga

SEQ ID NO: 8849 - DNA, 20 bp, Artificial Sequence
  Chr8_4 Forward Primer
tgctttgagagcaggttgaa

SEQ ID NO: 8850 - DNA, 20 bp, Artificial Sequence
  Chr8_4 Forward Primer
ctgttctggaaaacgggaac

SEQ ID NO: 8851 - DNA, 20 bp, Artificial Sequence
  Chr8_4 Forward Primer
tgccatgtgtttgctctctt

SEQ ID NO: 8852 - DNA, 20 bp, Artificial Sequence
  Chr8_4 Forward Primer
catcaaagcatgatgttggg

SEQ ID NO: 8853 - DNA, 20 bp, Artificial Sequence
  Chr8_4 Forward Primer
caacaactcgaagctcagca

SEQ ID NO: 8854 - DNA, 20 bp, Artificial Sequence
  Chr8_4 Forward Primer
agcacagagagaggcgtgtt

SEQ ID NO: 8855 - DNA, 20 bp, Artificial Sequence
  Chr8_4 Forward Primer
atgacggtttggatctttgg

SEQ ID NO: 8856 - DNA, 20 bp, Artificial Sequence
  Chr8_4 Forward Primer
gttcagatggaccttgccat

SEQ ID NO: 8857 - DNA, 20 bp, Artificial Sequence
  Chr8_4 Forward Primer
ttcttgattctggggactgg

SEQ ID NO: 8858 - DNA, 20 bp, Artificial Sequence
  Chr8_4 Forward Primer
ttccaggcactgttttaggg

SEQ ID NO: 8859 - DNA, 20 bp, Artificial Sequence
  Chr8_4 Forward Primer
cacggagtgtctgagttgga

SEQ ID NO: 8860 - DNA, 20 bp, Artificial Sequence
  Chr8_4 Forward Primer
tgcccagtagagaggaaagc

SEQ ID NO: 8861 - DNA, 27 bp, Artificial Sequence
  Chr8_4 Forward Primer
atttcagcatcacagtataaagactta

SEQ ID NO: 8862 - DNA, 20 bp, Artificial Sequence
  Chr8_4 Forward Primer
tcctctgaaaatgccgaagt

SEQ ID NO: 8863 - DNA, 22 bp, Artificial Sequence
  Chr8_4 Forward Primer
aagtttctcttccctctgagca

SEQ ID NO: 8864 - DNA, 20 bp, Artificial Sequence
  Chr8_4 Forward Primer
tgtttggttgcacttagcca

SEQ ID NO: 8865 - DNA, 20 bp, Artificial Sequence
  Chr8_4 Forward Primer
ggctccagcaataagcctaa

SEQ ID NO: 8866 - DNA, 20 bp, Artificial Sequence
  Chr8_4 Forward Primer
cagatgggtccctgtcctta

SEQ ID NO: 8867 - DNA, 20 bp, Artificial Sequence
  Chr8_4 Forward Primer
actggcagggacctgatatg

SEQ ID NO: 8868 - DNA, 20 bp, Artificial Sequence
  Chr8_4 Forward Primer
tgacaggtgcttgttccttg

SEQ ID NO: 8869 - DNA, 20 bp, Artificial Sequence
  Chr8_4 Forward Primer
ttttctcctgcccttcaatg

SEQ ID NO: 8870 - DNA, 20 bp, Artificial Sequence
  Chr8_4 Forward Primer
ctggccctgctaaacaagac

SEQ ID NO: 8871 - DNA, 20 bp, Artificial Sequence
  Chr8_4 Forward Primer
attgttttggcatgagggtt

SEQ ID NO: 8872 - DNA, 20 bp, Artificial Sequence
  Chr8_4 Forward Primer
ttctatatgacgccagggct

SEQ ID NO: 8873 - DNA, 22 bp, Artificial Sequence
  Chr8_4 Forward Primer
cagagggaaaattttgaacaga

SEQ ID NO: 8874 - DNA, 20 bp, Artificial Sequence
  Chr8_4 Forward Primer
cctggtccaaagctctctgt

SEQ ID NO: 8875 - DNA, 20 bp, Artificial Sequence
  Chr8_4 Forward Primer
ctcctgttgcaattccgttt

SEQ ID NO: 8876 - DNA, 20 bp, Artificial Sequence
  Chr8_4 Forward Primer
ggaaagaaaggtctgggagg

SEQ ID NO: 8877 - DNA, 21 bp, Artificial Sequence
  Chr8_4 Forward Primer
tcaagaggagaagaaggctga

SEQ ID NO: 8878 - DNA, 23 bp, Artificial Sequence
  Chr8_4 Forward Primer
tctccaatggattaatgaaggaa

SEQ ID NO: 8879 - DNA, 21 bp, Artificial Sequence
  Chr8_4 Forward Primer
gagctgtacgactgtgagcaa

SEQ ID NO: 8880 - DNA, 20 bp, Artificial Sequence
  Chr8_4 Forward Primer
ttttatggtggtgaggggag

SEQ ID NO: 8881 - DNA, 25 bp, Artificial Sequence
  Chr8_4 Forward Primer
ttgatggtatttcaggaaaatcaaa

SEQ ID NO: 8882 - DNA, 20 bp, Artificial Sequence
  Chr8_4 Forward Primer
tttccatgggctggaaatac

SEQ ID NO: 8883 - DNA, 20 bp, Artificial Sequence
  Chr8_4 Forward Primer
accatttctgccacccatta

SEQ ID NO: 8884 - DNA, 20 bp, Artificial Sequence
  Chr8_4 Forward Primer
aatcatcaactgaagcccca

SEQ ID NO: 8885 - DNA, 20 bp, Artificial Sequence
  Chr8_4 Forward Primer
tggccctcgatacagtcatt

SEQ ID NO: 8886 - DNA, 20 bp, Artificial Sequence
  Chr8_4 Forward Primer
ttccctttccaaaagcaatg

SEQ ID NO: 8887 - DNA, 20 bp, Artificial Sequence
  Chr8_4 Forward Primer
tctcttccatcagccacctc

SEQ ID NO: 8888 - DNA, 20 bp, Artificial Sequence
  Chr8_4 Forward Primer
ggttttgtgagcagatgggt

SEQ ID NO: 8889 - DNA, 21 bp, Artificial Sequence
  Chr8_4 Forward Primer
aatgacaggatgggttcattg

SEQ ID NO: 8890 - DNA, 20 bp, Artificial Sequence
  Chr8_4 Forward Primer
ccttattgcagaaagcaggc

SEQ ID NO: 8891 - DNA, 21 bp, Artificial Sequence
  Chr8_4 Forward Primer
cactctgaggattctgcactg

SEQ ID NO: 8892 - DNA, 21 bp, Artificial Sequence
  Chr8_4 Forward Primer
tcaagctgtaagcccttgaga

SEQ ID NO: 8893 - DNA, 24 bp, Artificial Sequence
  Chr8_4 Forward Primer
gctttgatttcacaaagaaagaaa

SEQ ID NO: 8894 - DNA, 20 bp, Artificial Sequence
  Chr8_4 Forward Primer
gccagccatcacatttttag

SEQ ID NO: 8895 - DNA, 20 bp, Artificial Sequence
  Chr8_4 Forward Primer
acatgggctcagatttttgc

SEQ ID NO: 8896 - DNA, 20 bp, Artificial Sequence
  Chr8_4 Forward Primer
gctgtcgtgacagggtgtag

SEQ ID NO: 8897 - DNA, 24 bp, Artificial Sequence
  Chr8_4 Forward Primer
tgtgaagatcatccttgtttttct

SEQ ID NO: 8898 - DNA, 20 bp, Artificial Sequence
  Chr8_4 Forward Primer
gcactgcttccatattggct

SEQ ID NO: 8899 - DNA, 20 bp, Artificial Sequence
  Chr8_4 Forward Primer
caaattgttgtccctttggg

SEQ ID NO: 8900 - DNA, 20 bp, Artificial Sequence
  Chr8_4 Forward Primer
cccacctctctggggagtat

SEQ ID NO: 8901 - DNA, 25 bp, Artificial Sequence
  Chr8_4 Forward Primer
tttgttaaccatgatctcaaaatga

SEQ ID NO: 8902 - DNA, 20 bp, Artificial Sequence
  Chr8_4 Forward Primer
gcatcatgctcttgctcgta

SEQ ID NO: 8903 - DNA, 22 bp, Artificial Sequence
  Chr8_4 Forward Primer
tttagatggatggagcacttga

SEQ ID NO: 8904 - DNA, 20 bp, Artificial Sequence
  Chr8_4 Forward Primer
cctcagcagatcctaccagc

SEQ ID NO: 8905 - DNA, 20 bp, Artificial Sequence
  Chr8_4 Forward Primer
agcagcctcgtgttcttctc

SEQ ID NO: 8906 - DNA, 20 bp, Artificial Sequence
  Chr8_4 Forward Primer
catatgccgggcactaatct

SEQ ID NO: 8907 - DNA, 20 bp, Artificial Sequence
  Chr8_4 Forward Primer
cgtgaggcctctctgtcata

SEQ ID NO: 8908 - DNA, 20 bp, Artificial Sequence
  Chr8_4 Forward Primer
ccacctacccacacccatac

SEQ ID NO: 8909 - DNA, 20 bp, Artificial Sequence
  Chr8_4 Forward Primer
tgctttgctcactcagcagt

SEQ ID NO: 8910 - DNA, 20 bp, Artificial Sequence
  Chr8_4 Forward Primer
tggatatggtcttgaatcgg

SEQ ID NO: 8911 - DNA, 20 bp, Artificial Sequence
  Chr8_4 Forward Primer
tgctttgtgatctggcttgt

SEQ ID NO: 8912 - DNA, 20 bp, Artificial Sequence
  Chr8_4 Forward Primer
ttcctgttaccctcctgcac

SEQ ID NO: 8913 - DNA, 20 bp, Artificial Sequence
  Chr8_4 Forward Primer
gggaaaggaggagcaaagtc

SEQ ID NO: 8914 - DNA, 23 bp, Artificial Sequence
  Chr8_4 Forward Primer
tgtcaaatgggaaggaagtagaa

SEQ ID NO: 8915 - DNA, 20 bp, Artificial Sequence
  Chr8_4 Forward Primer
aatgccactttctttggtgg

SEQ ID NO: 8916 - DNA, 20 bp, Artificial Sequence
  Chr8_4 Forward Primer
gctccgtagatacctctggc

SEQ ID NO: 8917 - DNA, 20 bp, Artificial Sequence
  Chr8_4 Forward Primer
cattgtcagtgtgggtccag

SEQ ID NO: 8918 - DNA, 21 bp, Artificial Sequence
  Chr8_4 Forward Primer
aatgagattctgcttgacgga

SEQ ID NO: 8919 - DNA, 20 bp, Artificial Sequence
  Chr8_4 Forward Primer
gccaggaagacatggacaat

SEQ ID NO: 8920 - DNA, 20 bp, Artificial Sequence
  Chr8_4 Forward Primer
tcatccactcccttgctctt

SEQ ID NO: 8921 - DNA, 20 bp, Artificial Sequence
  Chr8_4 Forward Primer
ggcagtgtctggataaggga

SEQ ID NO: 8922 - DNA, 20 bp, Artificial Sequence
  Chr8_4 Forward Primer
gcagttaggaaagggaagcc

SEQ ID NO: 8923 - DNA, 20 bp, Artificial Sequence
  Chr8_4 Forward Primer
catcaaatctgccacacgaa

SEQ ID NO: 8924 - DNA, 20 bp, Artificial Sequence
  Chr8_4 Forward Primer
ctggttgacatgggttgctt

SEQ ID NO: 8925 - DNA, 22 bp, Artificial Sequence
  Chr8_4 Forward Primer
tgtttaccacttggcaaaaatg

SEQ ID NO: 8926 - DNA, 20 bp, Artificial Sequence
  Chr8_4 Forward Primer
agaggtggcccctacaaaat

SEQ ID NO: 8927 - DNA, 21 bp, Artificial Sequence
  Chr8_4 Forward Primer
catgtcataggcaaacatcca

SEQ ID NO: 8928 - DNA, 20 bp, Artificial Sequence
  Chr8_4 Forward Primer
ggaggttgattgaaaaaccc

SEQ ID NO: 8929 - DNA, 20 bp, Artificial Sequence
  Chr8_4 Forward Primer
tgtgccactactgcacaatg

SEQ ID NO: 8930 - DNA, 21 bp, Artificial Sequence
  Chr8_4 Forward Primer
gaaaagggttagcaccactca

SEQ ID NO: 8931 - DNA, 20 bp, Artificial Sequence
  Chr8_4 Forward Primer
ataagttggctggatggacc

SEQ ID NO: 8932 - DNA, 20 bp, Artificial Sequence
  Chr8_4 Forward Primer
gcttgaaacagaggccacat

SEQ ID NO: 8933 - DNA, 20 bp, Artificial Sequence
  Chr8_4 Forward Primer
agataacgtgcagaaacccg

SEQ ID NO: 8934 - DNA, 20 bp, Artificial Sequence
  Chr8_4 Forward Primer
cacaggtcccctaactcctg

SEQ ID NO: 8935 - DNA, 20 bp, Artificial Sequence
  Chr8_4 Forward Primer
aaaaaggcttgaaagcagca

SEQ ID NO: 8936 - DNA, 22 bp, Artificial Sequence
  Chr8_4 Forward Primer
acaagagctaagatttgctggc

SEQ ID NO: 8937 - DNA, 20 bp, Artificial Sequence
  Chr8_4 Forward Primer
accactctcacctttcccct

SEQ ID NO: 8938 - DNA, 20 bp, Artificial Sequence
  Chr8_4 Forward Primer
aatgaggtgtcaccgtggtc

SEQ ID NO: 8939 - DNA, 20 bp, Artificial Sequence
  Chr8_4 Forward Primer
acctgcattatgccgaagag

SEQ ID NO: 8940 - DNA, 20 bp, Artificial Sequence
  Chr8_4 Forward Primer
cgaaccttggagtcaggatt

SEQ ID NO: 8941 - DNA, 20 bp, Artificial Sequence
  Chr8_4 Forward Primer
cagagccataaccttgctgg

SEQ ID NO: 8942 - DNA, 20 bp, Artificial Sequence
  Chr8_4 Forward Primer
cttccatgcacataactgcc

SEQ ID NO: 8943 - DNA, 20 bp, Artificial Sequence
  Chr8_4 Forward Primer
ccacatcccagtgctgtaga

SEQ ID NO: 8944 - DNA, 20 bp, Artificial Sequence
  Chr8_4 Forward Primer
gcgtttcattgaccagacct

SEQ ID NO: 8945 - DNA, 20 bp, Artificial Sequence
  Chr8_4 Reverse Primer
ttgtggtcagtgtcggagag

SEQ ID NO: 8946 - DNA, 20 bp, Artificial Sequence
  Chr8_4 Reverse Primer
gagtcttggaaagcgaagga

SEQ ID NO: 8947 - DNA, 22 bp, Artificial Sequence
  Chr8_4 Reverse Primer
aaaaagtgctgaattgtggaaa

SEQ ID NO: 8948 - DNA, 20 bp, Artificial Sequence
  Chr8_4 Reverse Primer
caccaattttcccccttttt

SEQ ID NO: 8949 - DNA, 20 bp, Artificial Sequence
  Chr8_4 Reverse Primer
agtgtcacagaggtgggagg

SEQ ID NO: 8950 - DNA, 20 bp, Artificial Sequence
  Chr8_4 Reverse Primer
tcctttttcccctcctccta

SEQ ID NO: 8951 - DNA, 20 bp, Artificial Sequence
  Chr8_4 Reverse Primer
tcgataatcccttccagtgc

SEQ ID NO: 8952 - DNA, 20 bp, Artificial Sequence
  Chr8_4 Reverse Primer
cccgtgctcattctcttttc

SEQ ID NO: 8953 - DNA, 20 bp, Artificial Sequence
  Chr8_4 Reverse Primer
ttccaggtagagggaacagc

SEQ ID NO: 8954 - DNA, 19 bp, Artificial Sequence
  Chr8_4 Reverse Primer
aaagctttgcctgaccacc

SEQ ID NO: 8955 - DNA, 20 bp, Artificial Sequence
  Chr8_4 Reverse Primer
ccctgcttagaattgtccca

SEQ ID NO: 8956 - DNA, 20 bp, Artificial Sequence
  Chr8_4 Reverse Primer
tgggacagttcctcaacaca

SEQ ID NO: 8957 - DNA, 20 bp, Artificial Sequence
  Chr8_4 Reverse Primer
gaaatgcatggatgtgtgga

SEQ ID NO: 8958 - DNA, 20 bp, Artificial Sequence
  Chr8_4 Reverse Primer
ggatgtgacaactccctgct

SEQ ID NO: 8959 - DNA, 21 bp, Artificial Sequence
  Chr8_4 Reverse Primer
gggtagttaacatgacctggc

SEQ ID NO: 8960 - DNA, 20 bp, Artificial Sequence
  Chr8_4 Reverse Primer
ggaactgcaagttacccagc

SEQ ID NO: 8961 - DNA, 20 bp, Artificial Sequence
  Chr8_4 Reverse Primer
tcccttcctcgtctttcaga

SEQ ID NO: 8962 - DNA, 20 bp, Artificial Sequence
  Chr8_4 Reverse Primer
cggtgaaaccagaacagtca

SEQ ID NO: 8963 - DNA, 20 bp, Artificial Sequence
  Chr8_4 Reverse Primer
cgtctcctttcagttgggaa

SEQ ID NO: 8964 - DNA, 20 bp, Artificial Sequence
  Chr8_4 Reverse Primer
acaccgaggatcaaggtgag

SEQ ID NO: 8965 - DNA, 20 bp, Artificial Sequence
  Chr8_4 Reverse Primer
ggggagactcatcattccct

SEQ ID NO: 8966 - DNA, 20 bp, Artificial Sequence
  Chr8_4 Reverse Primer
tacagctctcagggtgcaaa

SEQ ID NO: 8967 - DNA, 20 bp, Artificial Sequence
  Chr8_4 Reverse Primer
aaaatgtcactctgcccagc

SEQ ID NO: 8968 - DNA, 20 bp, Artificial Sequence
  Chr8_4 Reverse Primer
ttccatacccttgccttctg

SEQ ID NO: 8969 - DNA, 20 bp, Artificial Sequence
  Chr8_4 Reverse Primer
caaggggctgaacagctcta

SEQ ID NO: 8970 - DNA, 20 bp, Artificial Sequence
  Chr8_4 Reverse Primer
agcctgtcataaaactgggc

SEQ ID NO: 8971 - DNA, 20 bp, Artificial Sequence
  Chr8_4 Reverse Primer
tcctatctgggcctcaagtg

SEQ ID NO: 8972 - DNA, 20 bp, Artificial Sequence
  Chr8_4 Reverse Primer
ggaccagatccttctgcatc

SEQ ID NO: 8973 - DNA, 20 bp, Artificial Sequence
  Chr8_4 Reverse Primer
atcctttgagcatcatgggt

SEQ ID NO: 8974 - DNA, 20 bp, Artificial Sequence
  Chr8_4 Reverse Primer
attcttcctcctggggctaa

SEQ ID NO: 8975 - DNA, 20 bp, Artificial Sequence
  Chr8_4 Reverse Primer
ttttgcacatggaaggaaga

SEQ ID NO: 8976 - DNA, 20 bp, Artificial Sequence
  Chr8_4 Reverse Primer
ggatggaactcaaccaatcg

SEQ ID NO: 8977 - DNA, 20 bp, Artificial Sequence
  Chr8_4 Reverse Primer
aaaaacccactgctgtcaga

SEQ ID NO: 8978 - DNA, 22 bp, Artificial Sequence
  Chr8_4 Reverse Primer
caaaagcaaagctactttgtgg

SEQ ID NO: 8979 - DNA, 20 bp, Artificial Sequence
  Chr8_4 Reverse Primer
tccttcctttcctgtcctga

SEQ ID NO: 8980 - DNA, 21 bp, Artificial Sequence
  Chr8_4 Reverse Primer
cccaggtgtttactcctgctt

SEQ ID NO: 8981 - DNA, 20 bp, Artificial Sequence
  Chr8_4 Reverse Primer
gtgaggggaggtgtggagta

SEQ ID NO: 8982 - DNA, 20 bp, Artificial Sequence
  Chr8_4 Reverse Primer
tttcctggctgtgattttcc

SEQ ID NO: 8983 - DNA, 23 bp, Artificial Sequence
  Chr8_4 Reverse Primer
ggaaatgaatcaaattccaacaa

SEQ ID NO: 8984 - DNA, 20 bp, Artificial Sequence
  Chr8_4 Reverse Primer
cgattgttgtgagaggcaga

SEQ ID NO: 8985 - DNA, 21 bp, Artificial Sequence
  Chr8_4 Reverse Primer
ctgtttgagttttcccatcca

SEQ ID NO: 8986 - DNA, 20 bp, Artificial Sequence
  Chr8_4 Reverse Primer
ctcaggtttccaaagcagga

SEQ ID NO: 8987 - DNA, 20 bp, Artificial Sequence
  Chr8_4 Reverse Primer
cagggcctgcacacttagtt

SEQ ID NO: 8988 - DNA, 20 bp, Artificial Sequence
  Chr8_4 Reverse Primer
tggatggcgatgacaataaa

SEQ ID NO: 8989 - DNA, 18 bp, Artificial Sequence
  Chr8_4 Reverse Primer
aatgccattgtgccccac

SEQ ID NO: 8990 - DNA, 22 bp, Artificial Sequence
  Chr8_4 Reverse Primer
tgcctaaaggtttggaaatatg

SEQ ID NO: 8991 - DNA, 20 bp, Artificial Sequence
  Chr8_4 Reverse Primer
ccagggaggaacctcttctt

SEQ ID NO: 8992 - DNA, 20 bp, Artificial Sequence
  Chr8_4 Reverse Primer
cccttaaaataggccatcca

SEQ ID NO: 8993 - DNA, 20 bp, Artificial Sequence
  Chr8_4 Reverse Primer
tgacacattcatctggcctc

SEQ ID NO: 8994 - DNA, 20 bp, Artificial Sequence
  Chr8_4 Reverse Primer
ccatgctccttcctctgact

SEQ ID NO: 8995 - DNA, 20 bp, Artificial Sequence
  Chr8_4 Reverse Primer
aatgattcatgaagccagcc

SEQ ID NO: 8996 - DNA, 20 bp, Artificial Sequence
  Chr8_4 Reverse Primer
tcatttgcttgaccccctac

SEQ ID NO: 8997 - DNA, 20 bp, Artificial Sequence
  Chr8_4 Reverse Primer
actgccttttatcccccatc

SEQ ID NO: 8998 - DNA, 22 bp, Artificial Sequence
  Chr8_4 Reverse Primer
aacctaaaggttgtggttttgc

SEQ ID NO: 8999 - DNA, 21 bp, Artificial Sequence
  Chr8_4 Reverse Primer
tccccaataaacctactgcac

SEQ ID NO: 9000 - DNA, 20 bp, Artificial Sequence
  Chr8_4 Reverse Primer
tgcctgatgccaactcatag

SEQ ID NO: 9001 - DNA, 20 bp, Artificial Sequence
  Chr8_4 Reverse Primer
tctacaaggaaggcaaggga

SEQ ID NO: 9002 - DNA, 20 bp, Artificial Sequence
  Chr8_4 Reverse Primer
acctgttgtggagccagact

SEQ ID NO: 9003 - DNA, 25 bp, Artificial Sequence
  Chr8_4 Reverse Primer
ttttaatgatggttatttcagggtc

SEQ ID NO: 9004 - DNA, 22 bp, Artificial Sequence
  Chr8_4 Reverse Primer
ttgaaacaccaatgagttccat

SEQ ID NO: 9005 - DNA, 20 bp, Artificial Sequence
  Chr8_4 Reverse Primer
gatcccattatgcccatcac

SEQ ID NO: 9006 - DNA, 23 bp, Artificial Sequence
  Chr8_4 Reverse Primer
ggtggttttataacgttccattg

SEQ ID NO: 9007 - DNA, 20 bp, Artificial Sequence
  Chr8_4 Reverse Primer
aaaggtgagcagaaattgcc

SEQ ID NO: 9008 - DNA, 20 bp, Artificial Sequence
  Chr8_4 Reverse Primer
tgagcactttctccatgctg

SEQ ID NO: 9009 - DNA, 20 bp, Artificial Sequence
  Chr8_4 Reverse Primer
acatgcctaaaggctctgga

SEQ ID NO: 9010 - DNA, 20 bp, Artificial Sequence
  Chr8_4 Reverse Primer
cggagatttgccaaaagaac

SEQ ID NO: 9011 - DNA, 21 bp, Artificial Sequence
  Chr8_4 Reverse Primer
tctgcaaattaccacctgctt

SEQ ID NO: 9012 - DNA, 24 bp, Artificial Sequence
  Chr8_4 Reverse Primer
ccttaatcacaattgttttctgga

SEQ ID NO: 9013 - DNA, 20 bp, Artificial Sequence
  Chr8_4 Reverse Primer
attatgtgcaaggccctgag

SEQ ID NO: 9014 - DNA, 20 bp, Artificial Sequence
  Chr8_4 Reverse Primer
tcagagacatgacctggctg

SEQ ID NO: 9015 - DNA, 20 bp, Artificial Sequence
  Chr8_4 Reverse Primer
gtctgaccctgtgggtgtct

SEQ ID NO: 9016 - DNA, 20 bp, Artificial Sequence
  Chr8_4 Reverse Primer
ttttcctcacagcctcaggt

SEQ ID NO: 9017 - DNA, 20 bp, Artificial Sequence
  Chr8_4 Reverse Primer
aatttgattcctgggaaggg

SEQ ID NO: 9018 - DNA, 21 bp, Artificial Sequence
  Chr8_4 Reverse Primer
tctgtgaccccacataagtca

SEQ ID NO: 9019 - DNA, 20 bp, Artificial Sequence
  Chr8_4 Reverse Primer
ttccggtgataactgcaatg

SEQ ID NO: 9020 - DNA, 20 bp, Artificial Sequence
  Chr8_4 Reverse Primer
ccacgtggtctgagaaaaca

SEQ ID NO: 9021 - DNA, 20 bp, Artificial Sequence
  Chr8_4 Reverse Primer
ggagctgtgaactcctctcg

SEQ ID NO: 9022 - DNA, 20 bp, Artificial Sequence
  Chr8_4 Reverse Primer
accactgaattgcctccatc

SEQ ID NO: 9023 - DNA, 20 bp, Artificial Sequence
  Chr8_4 Reverse Primer
atttgtctggaaaatgccca

SEQ ID NO: 9024 - DNA, 20 bp, Artificial Sequence
  Chr8_4 Reverse Primer
agcagaggggaaggagaaag

SEQ ID NO: 9025 - DNA, 20 bp, Artificial Sequence
  Chr8_4 Reverse Primer
tgcacctgtcattaagcctg

SEQ ID NO: 9026 - DNA, 23 bp, Artificial Sequence
  Chr8_4 Reverse Primer
tgccatttctactttctcaggtc

SEQ ID NO: 9027 - DNA, 20 bp, Artificial Sequence
  Chr8_4 Reverse Primer
atatcgggcttaaggggttg

SEQ ID NO: 9028 - DNA, 23 bp, Artificial Sequence
  Chr8_4 Reverse Primer
gacctatcctgttggattttgaa

SEQ ID NO: 9029 - DNA, 20 bp, Artificial Sequence
  Chr8_4 Reverse Primer
tgaccagtgcttcactttgc

SEQ ID NO: 9030 - DNA, 20 bp, Artificial Sequence
  Chr8_4 Reverse Primer
tttggaagccacaaaattcc

SEQ ID NO: 9031 - DNA, 20 bp, Artificial Sequence
  Chr8_4 Reverse Primer
attctgcccagagtgtgcat

SEQ ID NO: 9032 - DNA, 20 bp, Artificial Sequence
  Chr8_4 Reverse Primer
actgcttgtggactctggct

SEQ ID NO: 9033 - DNA, 20 bp, Artificial Sequence
  Chr8_4 Reverse Primer
aatggtgcacgccagtaaat

SEQ ID NO: 9034 - DNA, 20 bp, Artificial Sequence
  Chr8_4 Reverse Primer
ttggcattgtaaaaccgtca

SEQ ID NO: 9035 - DNA, 20 bp, Artificial Sequence
  Chr8_4 Reverse Primer
atggccacaaagaaggctta

SEQ ID NO: 9036 - DNA, 20 bp, Artificial Sequence
  Chr8_4 Reverse Primer
ggtcattgaggctgtgtgtg

SEQ ID NO: 9037 - DNA, 22 bp, Artificial Sequence
  Chr8_4 Reverse Primer
ttctgtatccacaatgaggtgc

SEQ ID NO: 9038 - DNA, 21 bp, Artificial Sequence
  Chr8_4 Reverse Primer
tctgcataagctccattgtcc

SEQ ID NO: 9039 - DNA, 20 bp, Artificial Sequence
  Chr8_4 Reverse Primer
aaggatctcccctagcaagc

SEQ ID NO: 9040 - DNA, 20 bp, Artificial Sequence
  Chr8_4 Reverse Primer
ttgcacaatggaagagcaag

SEQ ID NO: 9041 - DNA, 20 bp, Artificial Sequence
  Chr8_5 Forward Primer
cactgttgcccagtgtcttg

SEQ ID NO: 9042 - DNA, 20 bp, Artificial Sequence
  Chr8_5 Forward Primer
atccgaccgtgtaacctcag

SEQ ID NO: 9043 - DNA, 20 bp, Artificial Sequence
  Chr8_5 Forward Primer
tgctgtgaggatgtgagagc

SEQ ID NO: 9044 - DNA, 20 bp, Artificial Sequence
  Chr8_5 Forward Primer
tgagaactgctgtggtctgc

SEQ ID NO: 9045 - DNA, 20 bp, Artificial Sequence
  Chr8_5 Forward Primer
aggtttcccttccttcctga

SEQ ID NO: 9046 - DNA, 20 bp, Artificial Sequence
  Chr8_5 Forward Primer
gtactgttggcttccccaaa

SEQ ID NO: 9047 - DNA, 20 bp, Artificial Sequence
  Chr8_5 Forward Primer
aatgatgccattttcatccc

SEQ ID NO: 9048 - DNA, 20 bp, Artificial Sequence
  Chr8_5 Forward Primer
tctgtgctgtgtcttcgtcc

SEQ ID NO: 9049 - DNA, 20 bp, Artificial Sequence
  Chr8_5 Forward Primer
accgtgggcacgttacttac

SEQ ID NO: 9050 - DNA, 20 bp, Artificial Sequence
  Chr8_5 Forward Primer
tgtttttgaggctgctgatg

SEQ ID NO: 9051 - DNA, 20 bp, Artificial Sequence
  Chr8_5 Forward Primer
tgccacgtaatgtgacccta

SEQ ID NO: 9052 - DNA, 20 bp, Artificial Sequence
  Chr8_5 Forward Primer
tcagcctttcctggattctg

SEQ ID NO: 9053 - DNA, 20 bp, Artificial Sequence
  Chr8_5 Forward Primer
ttgcatgcatccatctgact

SEQ ID NO: 9054 - DNA, 20 bp, Artificial Sequence
  Chr8_5 Forward Primer
gctcctcgacgttctgtttc

SEQ ID NO: 9055 - DNA, 20 bp, Artificial Sequence
  Chr8_5 Forward Primer
tgtcgaacctggtctcacag

SEQ ID NO: 9056 - DNA, 20 bp, Artificial Sequence
  Chr8_5 Forward Primer
gggattttcctgtgggtctt

SEQ ID NO: 9057 - DNA, 20 bp, Artificial Sequence
  Chr8_5 Forward Primer
gtgaagttgtcgcactttcg

SEQ ID NO: 9058 - DNA, 20 bp, Artificial Sequence
  Chr8_5 Forward Primer
cctgttgcctttctcactca

SEQ ID NO: 9059 - DNA, 20 bp, Artificial Sequence
  Chr8_5 Forward Primer
ctcggaagtcttgctgctct

SEQ ID NO: 9060 - DNA, 22 bp, Artificial Sequence
  Chr8_5 Forward Primer
gggaacatgaaaaattacctgg

SEQ ID NO: 9061 - DNA, 20 bp, Artificial Sequence
  Chr8_5 Forward Primer
agaatagatgaccaccccga

SEQ ID NO: 9062 - DNA, 20 bp, Artificial Sequence
  Chr8_5 Forward Primer
ccttgtctcagtctgggcat

SEQ ID NO: 9063 - DNA, 20 bp, Artificial Sequence
  Chr8_5 Forward Primer
tgctgatgagaagcattggt

SEQ ID NO: 9064 - DNA, 22 bp, Artificial Sequence
  Chr8_5 Forward Primer
tccccacctctcttatcttttg

SEQ ID NO: 9065 - DNA, 20 bp, Artificial Sequence
  Chr8_5 Forward Primer
cgtttccagacaactggcta

SEQ ID NO: 9066 - DNA, 20 bp, Artificial Sequence
  Chr8_5 Forward Primer
cgtagccagtgttgtgcagt

SEQ ID NO: 9067 - DNA, 20 bp, Artificial Sequence
  Chr8_5 Forward Primer
ctttattggcgtcagcatca

SEQ ID NO: 9068 - DNA, 20 bp, Artificial Sequence
  Chr8_5 Forward Primer
ctcagcctctgcgcttagat

SEQ ID NO: 9069 - DNA, 20 bp, Artificial Sequence
  Chr8_5 Forward Primer
ttgttgcagattgaggcaag

SEQ ID NO: 9070 - DNA, 20 bp, Artificial Sequence
  Chr8_5 Forward Primer
tccagcctatagtttcccca

SEQ ID NO: 9071 - DNA, 20 bp, Artificial Sequence
  Chr8_5 Forward Primer
ggacacgtgcctagcatttt

SEQ ID NO: 9072 - DNA, 20 bp, Artificial Sequence
  Chr8_5 Forward Primer
acctggtaagaagtgggcct

SEQ ID NO: 9073 - DNA, 20 bp, Artificial Sequence
  Chr8_5 Forward Primer
gccactgagtaggggtcaga

SEQ ID NO: 9074 - DNA, 20 bp, Artificial Sequence
  Chr8_5 Forward Primer
tcacacacaggaagacctgc

SEQ ID NO: 9075 - DNA, 20 bp, Artificial Sequence
  Chr8_5 Forward Primer
tctggagtcctcctcagctc

SEQ ID NO: 9076 - DNA, 20 bp, Artificial Sequence
  Chr8_5 Forward Primer
cttgccccagtcatttctgt

SEQ ID NO: 9077 - DNA, 20 bp, Artificial Sequence
  Chr8_5 Forward Primer
cctgaatctttagcccctcc

SEQ ID NO: 9078 - DNA, 20 bp, Artificial Sequence
  Chr8_5 Forward Primer
cagtgaccgtcgactactgg

SEQ ID NO: 9079 - DNA, 21 bp, Artificial Sequence
  Chr8_5 Forward Primer
gctgtgtcagtgtcatctgct

SEQ ID NO: 9080 - DNA, 23 bp, Artificial Sequence
  Chr8_5 Forward Primer
ggggcagaaaagaaataaaagtt

SEQ ID NO: 9081 - DNA, 20 bp, Artificial Sequence
  Chr8_5 Forward Primer
gaagtcataccagcctccca

SEQ ID NO: 9082 - DNA, 20 bp, Artificial Sequence
  Chr8_5 Forward Primer
gtgtctccaggctcttcagc

SEQ ID NO: 9083 - DNA, 20 bp, Artificial Sequence
  Chr8_5 Forward Primer
ttgcacacagttgtttccct

SEQ ID NO: 9084 - DNA, 21 bp, Artificial Sequence
  Chr8_5 Forward Primer
cttcaggtcacttgttgagca

SEQ ID NO: 9085 - DNA, 20 bp, Artificial Sequence
  Chr8_5 Forward Primer
gacaaatgcaatttgggctt

SEQ ID NO: 9086 - DNA, 20 bp, Artificial Sequence
  Chr8_5 Forward Primer
tcaccacttgccaatgagaa

SEQ ID NO: 9087 - DNA, 20 bp, Artificial Sequence
  Chr8_5 Forward Primer
tgtgtgcgtaggttttgcat

SEQ ID NO: 9088 - DNA, 20 bp, Artificial Sequence
  Chr8_5 Forward Primer
tctggaatgggttttcctcc

SEQ ID NO: 9089 - DNA, 20 bp, Artificial Sequence
  Chr8_5 Forward Primer
gggtggaagagatgattgga

SEQ ID NO: 9090 - DNA, 20 bp, Artificial Sequence
  Chr8_5 Forward Primer
ggctggaagtgtctcctcac

SEQ ID NO: 9091 - DNA, 20 bp, Artificial Sequence
  Chr8_5 Forward Primer
aatatgcgaaacatggcaca

SEQ ID NO: 9092 - DNA, 20 bp, Artificial Sequence
  Chr8_5 Forward Primer
gtttaccttggctgtgcctc

SEQ ID NO: 9093 - DNA, 20 bp, Artificial Sequence
  Chr8_5 Forward Primer
tctcagctgacttgtggagc

SEQ ID NO: 9094 - DNA, 20 bp, Artificial Sequence
  Chr8_5 Forward Primer
gggttggatccacaagattc

SEQ ID NO: 9095 - DNA, 20 bp, Artificial Sequence
  Chr8_5 Forward Primer
ccactggtacatgctgttgg

SEQ ID NO: 9096 - DNA, 20 bp, Artificial Sequence
  Chr8_5 Forward Primer
acagcatccagaccctgaag

SEQ ID NO: 9097 - DNA, 20 bp, Artificial Sequence
  Chr8_5 Forward Primer
ttagacctggcgaggtgagt

SEQ ID NO: 9098 - DNA, 20 bp, Artificial Sequence
  Chr8_5 Forward Primer
agtgcagaacctcaggcatt

SEQ ID NO: 9099 - DNA, 20 bp, Artificial Sequence
  Chr8_5 Forward Primer
gctgcatgaatggacagaga

SEQ ID NO: 9100 - DNA, 20 bp, Artificial Sequence
  Chr8_5 Forward Primer
tcctctgttttcccctgtgt

SEQ ID NO: 9101 - DNA, 20 bp, Artificial Sequence
  Chr8_5 Forward Primer
tgtgtcttgggcatcttctg

SEQ ID NO: 9102 - DNA, 20 bp, Artificial Sequence
  Chr8_5 Forward Primer
cctggtagaacggatgatgg

SEQ ID NO: 9103 - DNA, 20 bp, Artificial Sequence
  Chr8_5 Forward Primer
taatgcatttgagacgcagg

SEQ ID NO: 9104 - DNA, 20 bp, Artificial Sequence
  Chr8_5 Forward Primer
agcttcgagaagaaagtgcg

SEQ ID NO: 9105 - DNA, 20 bp, Artificial Sequence
  Chr8_5 Forward Primer
ctgtgcctttccacctctgt

SEQ ID NO: 9106 - DNA, 22 bp, Artificial Sequence
  Chr8_5 Forward Primer
aaagacgctttctccaagtacg

SEQ ID NO: 9107 - DNA, 20 bp, Artificial Sequence
  Chr8_5 Forward Primer
gggaaacaaaacagccaaga

SEQ ID NO: 9108 - DNA, 20 bp, Artificial Sequence
  Chr8_5 Forward Primer
agaggggacaatccacacac

SEQ ID NO: 9109 - DNA, 20 bp, Artificial Sequence
  Chr8_5 Forward Primer
gacacacaggtgagaaggca

SEQ ID NO: 9110 - DNA, 20 bp, Artificial Sequence
  Chr8_5 Forward Primer
gatttggggaagtccctctc

SEQ ID NO: 9111 - DNA, 20 bp, Artificial Sequence
  Chr8_5 Forward Primer
cttgggtgcttaacatggct

SEQ ID NO: 9112 - DNA, 20 bp, Artificial Sequence
  Chr8_5 Forward Primer
taggcacccaggtctcctta

SEQ ID NO: 9113 - DNA, 20 bp, Artificial Sequence
  Chr8_5 Forward Primer
aatgcctctcgacttagcca

SEQ ID NO: 9114 - DNA, 21 bp, Artificial Sequence
  Chr8_5 Forward Primer
tggctctcatagtcccttgaa

SEQ ID NO: 9115 - DNA, 20 bp, Artificial Sequence
  Chr8_5 Forward Primer
ctcctcttgcctgaaccatc

SEQ ID NO: 9116 - DNA, 20 bp, Artificial Sequence
  Chr8_5 Forward Primer
tcctgctggagacctcactt

SEQ ID NO: 9117 - DNA, 20 bp, Artificial Sequence
  Chr8_5 Forward Primer
agctcctgccatcagattgt

SEQ ID NO: 9118 - DNA, 22 bp, Artificial Sequence
  Chr8_5 Forward Primer
gaaaccaaatcccagaacttga

SEQ ID NO: 9119 - DNA, 20 bp, Artificial Sequence
  Chr8_5 Forward Primer
cgctcatatgtggaaagtgc

SEQ ID NO: 9120 - DNA, 20 bp, Artificial Sequence
  Chr8_5 Forward Primer
ggccttggagcttagtggta

SEQ ID NO: 9121 - DNA, 20 bp, Artificial Sequence
  Chr8_5 Forward Primer
tcctcctccagtctgtggac

SEQ ID NO: 9122 - DNA, 20 bp, Artificial Sequence
  Chr8_5 Forward Primer
ggagctggttacagacggaa

SEQ ID NO: 9123 - DNA, 20 bp, Artificial Sequence
  Chr8_5 Forward Primer
ttgtctgcacactggaggtc

SEQ ID NO: 9124 - DNA, 20 bp, Artificial Sequence
  Chr8_5 Forward Primer
tcttttcggcaaagttggag

SEQ ID NO: 9125 - DNA, 20 bp, Artificial Sequence
  Chr8_5 Forward Primer
gggagtccctgtctctcaca

SEQ ID NO: 9126 - DNA, 21 bp, Artificial Sequence
  Chr8_5 Forward Primer
aaaggcaagagcacaaaatga

SEQ ID NO: 9127 - DNA, 20 bp, Artificial Sequence
  Chr8_5 Forward Primer
cctgctgattgtgtgtgtga

SEQ ID NO: 9128 - DNA, 21 bp, Artificial Sequence
  Chr8_5 Forward Primer
gctcagaagtcctgcatctca

SEQ ID NO: 9129 - DNA, 20 bp, Artificial Sequence
  Chr8_5 Forward Primer
ggattcaaggcctgcaaata

SEQ ID NO: 9130 - DNA, 20 bp, Artificial Sequence
  Chr8_5 Forward Primer
atgtgcaaccacgtgtgaat

SEQ ID NO: 9131 - DNA, 20 bp, Artificial Sequence
  Chr8_5 Forward Primer
caccctctgtttggggaata

SEQ ID NO: 9132 - DNA, 20 bp, Artificial Sequence
  Chr8_5 Forward Primer
gcagggtggattaaaatgct

SEQ ID NO: 9133 - DNA, 20 bp, Artificial Sequence
  Chr8_5 Forward Primer
gaagtgtgaagccatttccc

SEQ ID NO: 9134 - DNA, 20 bp, Artificial Sequence
  Chr8_5 Forward Primer
gtcactgctcactgcagctt

SEQ ID NO: 9135 - DNA, 20 bp, Artificial Sequence
  Chr8_5 Forward Primer
cacaatcaccacaaccttgc

SEQ ID NO: 9136 - DNA, 20 bp, Artificial Sequence
  Chr8_5 Forward Primer
tgaacccaggagttacgctt

SEQ ID NO: 9137 - DNA, 20 bp, Artificial Sequence
  Chr8_5 Reverse Primer
gagaggagcttcccatctga

SEQ ID NO: 9138 - DNA, 20 bp, Artificial Sequence
  Chr8_5 Reverse Primer
ctcctagccatgtgggtgat

SEQ ID NO: 9139 - DNA, 20 bp, Artificial Sequence
  Chr8_5 Reverse Primer
agagctggtggtcacaaacc

SEQ ID NO: 9140 - DNA, 20 bp, Artificial Sequence
  Chr8_5 Reverse Primer
tgacctccctactccaccag

SEQ ID NO: 9141 - DNA, 20 bp, Artificial Sequence
  Chr8_5 Reverse Primer
gcctctcattggcaaagaac

SEQ ID NO: 9142 - DNA, 20 bp, Artificial Sequence
  Chr8_5 Reverse Primer
aagtccctctccctgtctcc

SEQ ID NO: 9143 - DNA, 20 bp, Artificial Sequence
  Chr8_5 Reverse Primer
ggccctggcttagagaagac

SEQ ID NO: 9144 - DNA, 20 bp, Artificial Sequence
  Chr8_5 Reverse Primer
gggtcagggtgtcaagaaaa

SEQ ID NO: 9145 - DNA, 20 bp, Artificial Sequence
  Chr8_5 Reverse Primer
ggcactgaaggtttccaaaa

SEQ ID NO: 9146 - DNA, 20 bp, Artificial Sequence
  Chr8_5 Reverse Primer
ggcaactccaacaaaggaaa

SEQ ID NO: 9147 - DNA, 20 bp, Artificial Sequence
  Chr8_5 Reverse Primer
atctgataagacccaggccc

SEQ ID NO: 9148 - DNA, 20 bp, Artificial Sequence
  Chr8_5 Reverse Primer
cacctgatgtgcagttcctg

SEQ ID NO: 9149 - DNA, 20 bp, Artificial Sequence
  Chr8_5 Reverse Primer
atcctaaagaaggggacgct

SEQ ID NO: 9150 - DNA, 20 bp, Artificial Sequence
  Chr8_5 Reverse Primer
aaagtggcaccatgacacaa

SEQ ID NO: 9151 - DNA, 20 bp, Artificial Sequence
  Chr8_5 Reverse Primer
gggctgggcctttatctaag

SEQ ID NO: 9152 - DNA, 21 bp, Artificial Sequence
  Chr8_5 Reverse Primer
cactatctgcacacaatggga

SEQ ID NO: 9153 - DNA, 20 bp, Artificial Sequence
  Chr8_5 Reverse Primer
aaacctactgcctgggtcct

SEQ ID NO: 9154 - DNA, 20 bp, Artificial Sequence
  Chr8_5 Reverse Primer
aagggtgggtccatgaatct

SEQ ID NO: 9155 - DNA, 20 bp, Artificial Sequence
  Chr8_5 Reverse Primer
tccttctctcaccctcctca

SEQ ID NO: 9156 - DNA, 20 bp, Artificial Sequence
  Chr8_5 Reverse Primer
tcaaaattgtttcaagccca

SEQ ID NO: 9157 - DNA, 20 bp, Artificial Sequence
  Chr8_5 Reverse Primer
gtgaagaggaggagcattcg

SEQ ID NO: 9158 - DNA, 20 bp, Artificial Sequence
  Chr8_5 Reverse Primer
actactggctggcagagagc

SEQ ID NO: 9159 - DNA, 20 bp, Artificial Sequence
  Chr8_5 Reverse Primer
taagtccagccttcgaccat

SEQ ID NO: 9160 - DNA, 20 bp, Artificial Sequence
  Chr8_5 Reverse Primer
atccagttgcagtggaaagg

SEQ ID NO: 9161 - DNA, 20 bp, Artificial Sequence
  Chr8_5 Reverse Primer
accctcaagagagggtgaat

SEQ ID NO: 9162 - DNA, 20 bp, Artificial Sequence
  Chr8_5 Reverse Primer
tcccaagaggtcagaactgg

SEQ ID NO: 9163 - DNA, 20 bp, Artificial Sequence
  Chr8_5 Reverse Primer
aagcactctttgccttgcat

SEQ ID NO: 9164 - DNA, 20 bp, Artificial Sequence
  Chr8_5 Reverse Primer
aaagcacaggcaaggaaatg

SEQ ID NO: 9165 - DNA, 20 bp, Artificial Sequence
  Chr8_5 Reverse Primer
ccacaaccaactgaccactg

SEQ ID NO: 9166 - DNA, 20 bp, Artificial Sequence
  Chr8_5 Reverse Primer
aggtgctaagggcagctgta

SEQ ID NO: 9167 - DNA, 20 bp, Artificial Sequence
  Chr8_5 Reverse Primer
ggaaggagaaagctgagggt

SEQ ID NO: 9168 - DNA, 20 bp, Artificial Sequence
  Chr8_5 Reverse Primer
cctccggacatcagagaaga

SEQ ID NO: 9169 - DNA, 20 bp, Artificial Sequence
  Chr8_5 Reverse Primer
gcttgctttcctgctaaacc

SEQ ID NO: 9170 - DNA, 20 bp, Artificial Sequence
  Chr8_5 Reverse Primer
cacacagtgtcaggagtggg

SEQ ID NO: 9171 - DNA, 20 bp, Artificial Sequence
  Chr8_5 Reverse Primer
tggtctggttggaaatgtga

SEQ ID NO: 9172 - DNA, 20 bp, Artificial Sequence
  Chr8_5 Reverse Primer
ttaagtgctggttgaacccc

SEQ ID NO: 9173 - DNA, 20 bp, Artificial Sequence
  Chr8_5 Reverse Primer
acctgagctgctcctctctg

SEQ ID NO: 9174 - DNA, 20 bp, Artificial Sequence
  Chr8_5 Reverse Primer
acaacacagatctcccaggc

SEQ ID NO: 9175 - DNA, 20 bp, Artificial Sequence
  Chr8_5 Reverse Primer
gtacccggccacattcttac

SEQ ID NO: 9176 - DNA, 20 bp, Artificial Sequence
  Chr8_5 Reverse Primer
tggaaatttgagccacatga

SEQ ID NO: 9177 - DNA, 20 bp, Artificial Sequence
  Chr8_5 Reverse Primer
tgcaggaccgtgttcagata

SEQ ID NO: 9178 - DNA, 20 bp, Artificial Sequence
  Chr8_5 Reverse Primer
atcaacgtccttccaaccac

SEQ ID NO: 9179 - DNA, 21 bp, Artificial Sequence
  Chr8_5 Reverse Primer
ccagaaggtgacaatagccag

SEQ ID NO: 9180 - DNA, 22 bp, Artificial Sequence
  Chr8_5 Reverse Primer
aatctacttgaaactggccacc

SEQ ID NO: 9181 - DNA, 20 bp, Artificial Sequence
  Chr8_5 Reverse Primer
gcttgggctgaaactctgac

SEQ ID NO: 9182 - DNA, 20 bp, Artificial Sequence
  Chr8_5 Reverse Primer
cccccaatttggactaaagg

SEQ ID NO: 9183 - DNA, 20 bp, Artificial Sequence
  Chr8_5 Reverse Primer
gaccatcttgtgcccagagt

SEQ ID NO: 9184 - DNA, 20 bp, Artificial Sequence
  Chr8_5 Reverse Primer
catgaggggtggaaagagaa

SEQ ID NO: 9185 - DNA, 20 bp, Artificial Sequence
  Chr8_5 Reverse Primer
cctgtgagcactcaaaccct

SEQ ID NO: 9186 - DNA, 20 bp, Artificial Sequence
  Chr8_5 Reverse Primer
tttgcctcagggctaacttg

SEQ ID NO: 9187 - DNA, 20 bp, Artificial Sequence
  Chr8_5 Reverse Primer
tgtcacagggtaggtgtgga

SEQ ID NO: 9188 - DNA, 20 bp, Artificial Sequence
  Chr8_5 Reverse Primer
gcaataaaggcaagagaccg

SEQ ID NO: 9189 - DNA, 20 bp, Artificial Sequence
  Chr8_5 Reverse Primer
catcatcttcagccagcaag

SEQ ID NO: 9190 - DNA, 20 bp, Artificial Sequence
  Chr8_5 Reverse Primer
cctgccttgtcccacatatt

SEQ ID NO: 9191 - DNA, 20 bp, Artificial Sequence
  Chr8_5 Reverse Primer
cttgggctcttgaactggag

SEQ ID NO: 9192 - DNA, 18 bp, Artificial Sequence
  Chr8_5 Reverse Primer
ccgtccatccaaaccagt

SEQ ID NO: 9193 - DNA, 20 bp, Artificial Sequence
  Chr8_5 Reverse Primer
aggaagacacaaaaggccaa

SEQ ID NO: 9194 - DNA, 20 bp, Artificial Sequence
  Chr8_5 Reverse Primer
agctgttgtttcggaggaga

SEQ ID NO: 9195 - DNA, 20 bp, Artificial Sequence
  Chr8_5 Reverse Primer
ttacgctgccctgagacttt

SEQ ID NO: 9196 - DNA, 21 bp, Artificial Sequence
  Chr8_5 Reverse Primer
tgtctatcctgatgctacccg

SEQ ID NO: 9197 - DNA, 20 bp, Artificial Sequence
  Chr8_5 Reverse Primer
aaaggaatgtggactgtggg

SEQ ID NO: 9198 - DNA, 20 bp, Artificial Sequence
  Chr8_5 Reverse Primer
tctagagaatggtcccgcac

SEQ ID NO: 9199 - DNA, 20 bp, Artificial Sequence
  Chr8_5 Reverse Primer
atggagccaatgccaaatac

SEQ ID NO: 9200 - DNA, 20 bp, Artificial Sequence
  Chr8_5 Reverse Primer
aactaatggcatttgggctg

SEQ ID NO: 9201 - DNA, 20 bp, Artificial Sequence
  Chr8_5 Reverse Primer
agcccctcagtttgtgctaa

SEQ ID NO: 9202 - DNA, 19 bp, Artificial Sequence
  Chr8_5 Reverse Primer
catcccatggactcacagc

SEQ ID NO: 9203 - DNA, 20 bp, Artificial Sequence
  Chr8_5 Reverse Primer
aatgcaccatctcctgcttc

SEQ ID NO: 9204 - DNA, 20 bp, Artificial Sequence
  Chr8_5 Reverse Primer
gatggcacatcaggctatca

SEQ ID NO: 9205 - DNA, 20 bp, Artificial Sequence
  Chr8_5 Reverse Primer
ttcagctggaacagctcctt

SEQ ID NO: 9206 - DNA, 20 bp, Artificial Sequence
  Chr8_5 Reverse Primer
ctggaccgaaagtatggcag

SEQ ID NO: 9207 - DNA, 20 bp, Artificial Sequence
  Chr8_5 Reverse Primer
tcacccctctgctgatctct

SEQ ID NO: 9208 - DNA, 20 bp, Artificial Sequence
  Chr8_5 Reverse Primer
atcacattttgcattcacgc

SEQ ID NO: 9209 - DNA, 20 bp, Artificial Sequence
  Chr8_5 Reverse Primer
ccagcagatgcaacaaacat

SEQ ID NO: 9210 - DNA, 20 bp, Artificial Sequence
  Chr8_5 Reverse Primer
gggtggtgactcggtaactc

SEQ ID NO: 9211 - DNA, 20 bp, Artificial Sequence
  Chr8_5 Reverse Primer
cccagatgagacttgacgaa

SEQ ID NO: 9212 - DNA, 20 bp, Artificial Sequence
  Chr8_5 Reverse Primer
ggtgtttcccatgcctagag

SEQ ID NO: 9213 - DNA, 20 bp, Artificial Sequence
  Chr8_5 Reverse Primer
actgggccacagtgaaaaag

SEQ ID NO: 9214 - DNA, 25 bp, Artificial Sequence
  Chr8_5 Reverse Primer
cagatctcaataaaagtcagaagca

SEQ ID NO: 9215 - DNA, 20 bp, Artificial Sequence
  Chr8_5 Reverse Primer
gcttcagccaccagttcttc

SEQ ID NO: 9216 - DNA, 20 bp, Artificial Sequence
  Chr8_5 Reverse Primer
ggctgcaattcacagtggta

SEQ ID NO: 9217 - DNA, 20 bp, Artificial Sequence
  Chr8_5 Reverse Primer
gtggctcacagcactcactc

SEQ ID NO: 9218 - DNA, 20 bp, Artificial Sequence
  Chr8_5 Reverse Primer
aggaaccaccatgtgagagc

SEQ ID NO: 9219 - DNA, 20 bp, Artificial Sequence
  Chr8_5 Reverse Primer
tttggagagcaggagaggac

SEQ ID NO: 9220 - DNA, 20 bp, Artificial Sequence
  Chr8_5 Reverse Primer
gcttgagcaggaatggagac

SEQ ID NO: 9221 - DNA, 20 bp, Artificial Sequence
  Chr8_5 Reverse Primer
gaagaagcagggttatggca

SEQ ID NO: 9222 - DNA, 23 bp, Artificial Sequence
  Chr8_5 Reverse Primer
tttcagatactttcccagtgcat

SEQ ID NO: 9223 - DNA, 20 bp, Artificial Sequence
  Chr8_5 Reverse Primer
ttggttggcattttcttcgt

SEQ ID NO: 9224 - DNA, 20 bp, Artificial Sequence
  Chr8_5 Reverse Primer
cccttccaattttccctttc

SEQ ID NO: 9225 - DNA, 20 bp, Artificial Sequence
  Chr8_5 Reverse Primer
gccagaggagcagacagaag

SEQ ID NO: 9226 - DNA, 20 bp, Artificial Sequence
  Chr8_5 Reverse Primer
acacacacgcccatatttca

SEQ ID NO: 9227 - DNA, 20 bp, Artificial Sequence
  Chr8_5 Reverse Primer
gctcttttcacaccccacat

SEQ ID NO: 9228 - DNA, 23 bp, Artificial Sequence
  Chr8_5 Reverse Primer
gcatgtctagcttgaaagtctcc

SEQ ID NO: 9229 - DNA, 20 bp, Artificial Sequence
  Chr8_5 Reverse Primer
ccgacatttgatctgcttca

SEQ ID NO: 9230 - DNA, 20 bp, Artificial Sequence
  Chr8_5 Reverse Primer
accattttcctaatgggggt

SEQ ID NO: 9231 - DNA, 27 bp, Artificial Sequence
  Chr8_5 Reverse Primer
caaaatgatacgtagttgctgtagaga

SEQ ID NO: 9232 - DNA, 20 bp, Artificial Sequence
  Chr8_5 Reverse Primer
tttttaatccccctgccttt

SEQ ID NO: 9233 - DNA, 25 bp, Artificial Sequence
  Chr8_6 Forward Primer
tgataaaaatatgctcaaaaacgaa

SEQ ID NO: 9234 - DNA, 21 bp, Artificial Sequence
  Chr8_6 Forward Primer
tgaatatcttggcaacagtcg

SEQ ID NO: 9235 - DNA, 24 bp, Artificial Sequence
  Chr8_6 Forward Primer
gcttatgaagttgtcaaaattccc

SEQ ID NO: 9236 - DNA, 21 bp, Artificial Sequence
  Chr8_6 Forward Primer
caagggctcttgtcattgttc

SEQ ID NO: 9237 - DNA, 20 bp, Artificial Sequence
  Chr8_6 Forward Primer
agccaatcactggaatgagc

SEQ ID NO: 9238 - DNA, 21 bp, Artificial Sequence
  Chr8_6 Forward Primer
tgccaaggtttttattctcca

SEQ ID NO: 9239 - DNA, 24 bp, Artificial Sequence
  Chr8_6 Forward Primer
tgcctcaacttaatgaaattgcta

SEQ ID NO: 9240 - DNA, 20 bp, Artificial Sequence
  Chr8_6 Forward Primer
tacgagttgtccctcgtggt

SEQ ID NO: 9241 - DNA, 20 bp, Artificial Sequence
  Chr8_6 Forward Primer
aaagttgcccaaagaaagca

SEQ ID NO: 9242 - DNA, 20 bp, Artificial Sequence
  Chr8_6 Forward Primer
aggttgttgagggaattgga

SEQ ID NO: 9243 - DNA, 20 bp, Artificial Sequence
  Chr8_6 Forward Primer
ctctcggatattgatgggga

SEQ ID NO: 9244 - DNA, 20 bp, Artificial Sequence
  Chr8_6 Forward Primer
tgatgggtcaagatgaccag

SEQ ID NO: 9245 - DNA, 20 bp, Artificial Sequence
  Chr8_6 Forward Primer
tccaattttctgttccctgc

SEQ ID NO: 9246 - DNA, 25 bp, Artificial Sequence
  Chr8_6 Forward Primer
ttggtagtaatgaaaactgttcacc

SEQ ID NO: 9247 - DNA, 20 bp, Artificial Sequence
  Chr8_6 Forward Primer
tttgtgttagccactgctgc

SEQ ID NO: 9248 - DNA, 20 bp, Artificial Sequence
  Chr8_6 Forward Primer
ctgcttttcagggatctcca

SEQ ID NO: 9249 - DNA, 24 bp, Artificial Sequence
  Chr8_6 Forward Primer
gaatctgatcttattgcaggtgaa

SEQ ID NO: 9250 - DNA, 20 bp, Artificial Sequence
  Chr8_6 Forward Primer
ccatcaactcacctcaccct

SEQ ID NO: 9251 - DNA, 20 bp, Artificial Sequence
  Chr8_6 Forward Primer
tgcacatacaatgggctttt

SEQ ID NO: 9252 - DNA, 20 bp, Artificial Sequence
  Chr8_6 Forward Primer
tgctcaaaatacctctgcca

SEQ ID NO: 9253 - DNA, 20 bp, Artificial Sequence
  Chr8_6 Forward Primer
tgaagtgtcaagtagggggc

SEQ ID NO: 9254 - DNA, 20 bp, Artificial Sequence
  Chr8_6 Forward Primer
cgatgttcgagttctcatgc

SEQ ID NO: 9255 - DNA, 20 bp, Artificial Sequence
  Chr8_6 Forward Primer
cagacagccccagatcagtt

SEQ ID NO: 9256 - DNA, 20 bp, Artificial Sequence
  Chr8_6 Forward Primer
tcacagcaatcagttgagca

SEQ ID NO: 9257 - DNA, 20 bp, Artificial Sequence
  Chr8_6 Forward Primer
acagcagacagaccttccca

SEQ ID NO: 9258 - DNA, 21 bp, Artificial Sequence
  Chr8_6 Forward Primer
tctgggtggttgttacacaga

SEQ ID NO: 9259 - DNA, 20 bp, Artificial Sequence
  Chr8_6 Forward Primer
ccttgtcatttttgcttcca

SEQ ID NO: 9260 - DNA, 20 bp, Artificial Sequence
  Chr8_6 Forward Primer
aagaatggccaacacagacc

SEQ ID NO: 9261 - DNA, 20 bp, Artificial Sequence
  Chr8_6 Forward Primer
ggagatgaggatgcaggaaa

SEQ ID NO: 9262 - DNA, 20 bp, Artificial Sequence
  Chr8_6 Forward Primer
ccatccactcctttctccaa

SEQ ID NO: 9263 - DNA, 21 bp, Artificial Sequence
  Chr8_6 Forward Primer
gcttaggaaacctttctgcaa

SEQ ID NO: 9264 - DNA, 20 bp, Artificial Sequence
  Chr8_6 Forward Primer
tggctcctactgcatcctct

SEQ ID NO: 9265 - DNA, 23 bp, Artificial Sequence
  Chr8_6 Forward Primer
ggagagaaacttgatttgacagg

SEQ ID NO: 9266 - DNA, 20 bp, Artificial Sequence
  Chr8_6 Forward Primer
ggggattctggggctattta

SEQ ID NO: 9267 - DNA, 20 bp, Artificial Sequence
  Chr8_6 Forward Primer
tgacagccagcctacatctg

SEQ ID NO: 9268 - DNA, 20 bp, Artificial Sequence
  Chr8_6 Forward Primer
gagatgccttccagatgtcc

SEQ ID NO: 9269 - DNA, 20 bp, Artificial Sequence
  Chr8_6 Forward Primer
tggttggagctaggaggaaa

SEQ ID NO: 9270 - DNA, 22 bp, Artificial Sequence
  Chr8_6 Forward Primer
tggcacttgaaataagtcaaca

SEQ ID NO: 9271 - DNA, 20 bp, Artificial Sequence
  Chr8_6 Forward Primer
ccatcctgattccagtgtga

SEQ ID NO: 9272 - DNA, 21 bp, Artificial Sequence
  Chr8_6 Forward Primer
ctccatctgcacttctgaaca

SEQ ID NO: 9273 - DNA, 20 bp, Artificial Sequence
  Chr8_6 Forward Primer
gagggaccttgagactgggt

SEQ ID NO: 9274 - DNA, 20 bp, Artificial Sequence
  Chr8_6 Forward Primer
cagcactctctgaggccatt

SEQ ID NO: 9275 - DNA, 20 bp, Artificial Sequence
  Chr8_6 Forward Primer
taagattcccttcagcgtgc

SEQ ID NO: 9276 - DNA, 20 bp, Artificial Sequence
  Chr8_6 Forward Primer
acgtctagcagtccacctcc

SEQ ID NO: 9277 - DNA, 20 bp, Artificial Sequence
  Chr8_6 Forward Primer
cctcctcccaagaacagcta

SEQ ID NO: 9278 - DNA, 20 bp, Artificial Sequence
  Chr8_6 Forward Primer
tgaaccacttcccacaatga

SEQ ID NO: 9279 - DNA, 27 bp, Artificial Sequence
  Chr8_6 Forward Primer
ttgtattaattttctcaacagtcaatg

SEQ ID NO: 9280 - DNA, 21 bp, Artificial Sequence
  Chr8_6 Forward Primer
cagtgaatttacctggggaca

SEQ ID NO: 9281 - DNA, 24 bp, Artificial Sequence
  Chr8_6 Forward Primer
caggaaattgtgcttacctttaga

SEQ ID NO: 9282 - DNA, 20 bp, Artificial Sequence
  Chr8_6 Forward Primer
ctgaatgcttggggctagag

SEQ ID NO: 9283 - DNA, 20 bp, Artificial Sequence
  Chr8_6 Forward Primer
aatgaggccactgtgaaacc

SEQ ID NO: 9284 - DNA, 20 bp, Artificial Sequence
  Chr8_6 Forward Primer
tttgcaatcaacacaggcat

SEQ ID NO: 9285 - DNA, 20 bp, Artificial Sequence
  Chr8_6 Forward Primer
tgcatgcatcaaccgaataa

SEQ ID NO: 9286 - DNA, 21 bp, Artificial Sequence
  Chr8_6 Forward Primer
aaaaatttggactcagggaga

SEQ ID NO: 9287 - DNA, 22 bp, Artificial Sequence
  Chr8_6 Forward Primer
tgaagttaccagggaacaaaaa

SEQ ID NO: 9288 - DNA, 20 bp, Artificial Sequence
  Chr8_6 Forward Primer
ggagaagagacctcagtgcg

SEQ ID NO: 9289 - DNA, 20 bp, Artificial Sequence
  Chr8_6 Forward Primer
tgcagtacctacgcctttcc

SEQ ID NO: 9290 - DNA, 22 bp, Artificial Sequence
  Chr8_6 Forward Primer
tgagtcacagttatgtgccaga

SEQ ID NO: 9291 - DNA, 22 bp, Artificial Sequence
  Chr8_6 Forward Primer
tgggcataacagagctcataga

SEQ ID NO: 9292 - DNA, 25 bp, Artificial Sequence
  Chr8_6 Forward Primer
tttcgattgtattaagtgttggaca

SEQ ID NO: 9293 - DNA, 25 bp, Artificial Sequence
  Chr8_6 Forward Primer
ttgacataattgctattgtctttcc

SEQ ID NO: 9294 - DNA, 20 bp, Artificial Sequence
  Chr8_6 Forward Primer
catgagccgctaatcaacaa

SEQ ID NO: 9295 - DNA, 20 bp, Artificial Sequence
  Chr8_6 Forward Primer
cgagatgagcacaaccaaga

SEQ ID NO: 9296 - DNA, 20 bp, Artificial Sequence
  Chr8_6 Forward Primer
ttttgttcacctgtccacca

SEQ ID NO: 9297 - DNA, 21 bp, Artificial Sequence
  Chr8_6 Forward Primer
aacccaaggacaggaagaaga

SEQ ID NO: 9298 - DNA, 20 bp, Artificial Sequence
  Chr8_6 Forward Primer
tgctccagctcaaagacaaa

SEQ ID NO: 9299 - DNA, 20 bp, Artificial Sequence
  Chr8_6 Forward Primer
atagcccggcttcaaagaat

SEQ ID NO: 9300 - DNA, 24 bp, Artificial Sequence
  Chr8_6 Forward Primer
aatgtgagcacagagtaaaaatca

SEQ ID NO: 9301 - DNA, 20 bp, Artificial Sequence
  Chr8_6 Forward Primer
gaggaagggtcaggttgaaa

SEQ ID NO: 9302 - DNA, 20 bp, Artificial Sequence
  Chr8_6 Forward Primer
gcaatggaccaagccatagt

SEQ ID NO: 9303 - DNA, 21 bp, Artificial Sequence
  Chr8_6 Forward Primer
tgccttactgggaagaaaaca

SEQ ID NO: 9304 - DNA, 21 bp, Artificial Sequence
  Chr8_6 Forward Primer
caaatttgagcttaccagcca

SEQ ID NO: 9305 - DNA, 22 bp, Artificial Sequence
  Chr8_6 Forward Primer
tcagctcaggtttacgtctcaa

SEQ ID NO: 9306 - DNA, 20 bp, Artificial Sequence
  Chr8_6 Forward Primer
tgctctttctccccacatct

SEQ ID NO: 9307 - DNA, 20 bp, Artificial Sequence
  Chr8_6 Forward Primer
tgggtttcaacttgctgact

SEQ ID NO: 9308 - DNA, 20 bp, Artificial Sequence
  Chr8_6 Forward Primer
gactacagcatggagggagc

SEQ ID NO: 9309 - DNA, 20 bp, Artificial Sequence
  Chr8_6 Forward Primer
tcattggccgttgtttatca

SEQ ID NO: 9310 - DNA, 20 bp, Artificial Sequence
  Chr8_6 Forward Primer
ccggttgcgtctttaatctt

SEQ ID NO: 9311 - DNA, 20 bp, Artificial Sequence
  Chr8_6 Forward Primer
ggtggccaaaatgacctaaa

SEQ ID NO: 9312 - DNA, 20 bp, Artificial Sequence
  Chr8_6 Forward Primer
actgttgtcccaaggctgag

SEQ ID NO: 9313 - DNA, 20 bp, Artificial Sequence
  Chr8_6 Forward Primer
cggatttatcaagccagcag

SEQ ID NO: 9314 - DNA, 20 bp, Artificial Sequence
  Chr8_6 Forward Primer
cccagggagttgcaatatgt

SEQ ID NO: 9315 - DNA, 20 bp, Artificial Sequence
  Chr8_6 Forward Primer
aaaagggcatctgccttacc

SEQ ID NO: 9316 - DNA, 20 bp, Artificial Sequence
  Chr8_6 Forward Primer
tcctggtggacagtgagaga

SEQ ID NO: 9317 - DNA, 22 bp, Artificial Sequence
  Chr8_6 Forward Primer
ccagtagcatgtcaaaaattgc

SEQ ID NO: 9318 - DNA, 20 bp, Artificial Sequence
  Chr8_6 Forward Primer
tgggggatcttttgggtaat

SEQ ID NO: 9319 - DNA, 20 bp, Artificial Sequence
  Chr8_6 Forward Primer
ttaaattggtgcaaggggtc

SEQ ID NO: 9320 - DNA, 21 bp, Artificial Sequence
  Chr8_6 Forward Primer
cccctgtattggtcactgtca

SEQ ID NO: 9321 - DNA, 21 bp, Artificial Sequence
  Chr8_6 Forward Primer
tggtgtccaatgatcacctaa

SEQ ID NO: 9322 - DNA, 22 bp, Artificial Sequence
  Chr8_6 Forward Primer
gcatcttaacagaacatcacgc

SEQ ID NO: 9323 - DNA, 21 bp, Artificial Sequence
  Chr8_6 Forward Primer
ttccaactggagtgaaaggaa

SEQ ID NO: 9324 - DNA, 20 bp, Artificial Sequence
  Chr8_6 Forward Primer
tttgtctttctggggcaaag

SEQ ID NO: 9325 - DNA, 21 bp, Artificial Sequence
  Chr8_6 Forward Primer
cccaagaagagttccaagaca

SEQ ID NO: 9326 - DNA, 22 bp, Artificial Sequence
  Chr8_6 Forward Primer
tgatatgccctattcattgaca

SEQ ID NO: 9327 - DNA, 20 bp, Artificial Sequence
  Chr8_6 Forward Primer
ggaaaaccatgatgttgcct

SEQ ID NO: 9328 - DNA, 20 bp, Artificial Sequence
  Chr8_6 Forward Primer
acaaaatcaaggcaatggga

SEQ ID NO: 9329 - DNA, 25 bp, Artificial Sequence
  Chr8_6 Reverse Primer
aaggcattaatacaggaggtagttt

SEQ ID NO: 9330 - DNA, 20 bp, Artificial Sequence
  Chr8_6 Reverse Primer
ttggtaacctggaaaatggc

SEQ ID NO: 9331 - DNA, 20 bp, Artificial Sequence
  Chr8_6 Reverse Primer
ttacccattgtttccttggc

SEQ ID NO: 9332 - DNA, 20 bp, Artificial Sequence
  Chr8_6 Reverse Primer
cttaagccagattcctgcca

SEQ ID NO: 9333 - DNA, 25 bp, Artificial Sequence
  Chr8_6 Reverse Primer
gatgtaattttattttgtgggattg

SEQ ID NO: 9334 - DNA, 21 bp, Artificial Sequence
  Chr8_6 Reverse Primer
ataatttgggggcaaaagatg

SEQ ID NO: 9335 - DNA, 20 bp, Artificial Sequence
  Chr8_6 Reverse Primer
agatgcaatggaggagatgc

SEQ ID NO: 9336 - DNA, 20 bp, Artificial Sequence
  Chr8_6 Reverse Primer
atgcctgggagtgatcttgt

SEQ ID NO: 9337 - DNA, 20 bp, Artificial Sequence
  Chr8_6 Reverse Primer
tttcatttgatggctcctcc

SEQ ID NO: 9338 - DNA, 20 bp, Artificial Sequence
  Chr8_6 Reverse Primer
gagcatttttcctttcgctg

SEQ ID NO: 9339 - DNA, 20 bp, Artificial Sequence
  Chr8_6 Reverse Primer
gcttaaggggaaatgtggct

SEQ ID NO: 9340 - DNA, 20 bp, Artificial Sequence
  Chr8_6 Reverse Primer
ctgcactgtgctttgcagtt

SEQ ID NO: 9341 - DNA, 21 bp, Artificial Sequence
  Chr8_6 Reverse Primer
tgcagtatttgttttcaccca

SEQ ID NO: 9342 - DNA, 21 bp, Artificial Sequence
  Chr8_6 Reverse Primer
ttgagagaatgtgatttgggg

SEQ ID NO: 9343 - DNA, 21 bp, Artificial Sequence
  Chr8_6 Reverse Primer
gcctgatattgaccaaagcaa

SEQ ID NO: 9344 - DNA, 20 bp, Artificial Sequence
  Chr8_6 Reverse Primer
catgtttggattgggtttcc

SEQ ID NO: 9345 - DNA, 22 bp, Artificial Sequence
  Chr8_6 Reverse Primer
tctgcttctgtcttcttcaagg

SEQ ID NO: 9346 - DNA, 21 bp, Artificial Sequence
  Chr8_6 Reverse Primer
gcctatgctaggagggatctt

SEQ ID NO: 9347 - DNA, 20 bp, Artificial Sequence
  Chr8_6 Reverse Primer
ccactgggaaacttgctcat

SEQ ID NO: 9348 - DNA, 20 bp, Artificial Sequence
  Chr8_6 Reverse Primer
ccatctctctaccaggctgc

SEQ ID NO: 9349 - DNA, 20 bp, Artificial Sequence
  Chr8_6 Reverse Primer
tgcaaggatgcaaacacttc

SEQ ID NO: 9350 - DNA, 22 bp, Artificial Sequence
  Chr8_6 Reverse Primer
ttggaatgatttcccatttaca

SEQ ID NO: 9351 - DNA, 20 bp, Artificial Sequence
  Chr8_6 Reverse Primer
gccaagagaatggggtacaa

SEQ ID NO: 9352 - DNA, 20 bp, Artificial Sequence
  Chr8_6 Reverse Primer
aacacacctgctttgcactg

SEQ ID NO: 9353 - DNA, 23 bp, Artificial Sequence
  Chr8_6 Reverse Primer
gcagaactggagacaaaaacttg

SEQ ID NO: 9354 - DNA, 20 bp, Artificial Sequence
  Chr8_6 Reverse Primer
gagggatatggaacggaaca

SEQ ID NO: 9355 - DNA, 20 bp, Artificial Sequence
  Chr8_6 Reverse Primer
tccaggcagctagtagggaa

SEQ ID NO: 9356 - DNA, 20 bp, Artificial Sequence
  Chr8_6 Reverse Primer
caatctggaaacccattgct

SEQ ID NO: 9357 - DNA, 20 bp, Artificial Sequence
  Chr8_6 Reverse Primer
ctcagttttggaccctggaa

SEQ ID NO: 9358 - DNA, 20 bp, Artificial Sequence
  Chr8_6 Reverse Primer
tagagcagcttaaggggcaa

SEQ ID NO: 9359 - DNA, 20 bp, Artificial Sequence
  Chr8_6 Reverse Primer
ggcatcctctgtttccaaag

SEQ ID NO: 9360 - DNA, 20 bp, Artificial Sequence
  Chr8_6 Reverse Primer
cctccctgaagtgttgctgt

SEQ ID NO: 9361 - DNA, 20 bp, Artificial Sequence
  Chr8_6 Reverse Primer
gcataacggtgtgcagagag

SEQ ID NO: 9362 - DNA, 20 bp, Artificial Sequence
  Chr8_6 Reverse Primer
aaagagatctgcacccctca

SEQ ID NO: 9363 - DNA, 20 bp, Artificial Sequence
  Chr8_6 Reverse Primer
tactttccatgcctcccaag

SEQ ID NO: 9364 - DNA, 21 bp, Artificial Sequence
  Chr8_6 Reverse Primer
cccagacaaaagatcaaatgc

SEQ ID NO: 9365 - DNA, 20 bp, Artificial Sequence
  Chr8_6 Reverse Primer
tcttgtcattggaaacaacg

SEQ ID NO: 9366 - DNA, 20 bp, Artificial Sequence
  Chr8_6 Reverse Primer
cgttgtagttggaggtgggt

SEQ ID NO: 9367 - DNA, 20 bp, Artificial Sequence
  Chr8_6 Reverse Primer
tcttcctcacagccaattcc

SEQ ID NO: 9368 - DNA, 20 bp, Artificial Sequence
  Chr8_6 Reverse Primer
agagcaagggggaatgtttt

SEQ ID NO: 9369 - DNA, 20 bp, Artificial Sequence
  Chr8_6 Reverse Primer
tttctgcacatggagggact

SEQ ID NO: 9370 - DNA, 23 bp, Artificial Sequence
  Chr8_6 Reverse Primer
gccaatattaaaatgagggttgg

SEQ ID NO: 9371 - DNA, 20 bp, Artificial Sequence
  Chr8_6 Reverse Primer
ctggtgaacagcgacttgaa

SEQ ID NO: 9372 - DNA, 20 bp, Artificial Sequence
  Chr8_6 Reverse Primer
ccttggctgagtgtagggac

SEQ ID NO: 9373 - DNA, 20 bp, Artificial Sequence
  Chr8_6 Reverse Primer
taggcagccatttatttggg

SEQ ID NO: 9374 - DNA, 26 bp, Artificial Sequence
  Chr8_6 Reverse Primer
ttgaaaacataaaactagctgacaaa

SEQ ID NO: 9375 - DNA, 23 bp, Artificial Sequence
  Chr8_6 Reverse Primer
catttcatgactgctatctgagc

SEQ ID NO: 9376 - DNA, 20 bp, Artificial Sequence
  Chr8_6 Reverse Primer
ggaaacggcatcactattgg

SEQ ID NO: 9377 - DNA, 20 bp, Artificial Sequence
  Chr8_6 Reverse Primer
tggtcattctacttgccgtg

SEQ ID NO: 9378 - DNA, 20 bp, Artificial Sequence
  Chr8_6 Reverse Primer
tccagggatttcccattgta

SEQ ID NO: 9379 - DNA, 20 bp, Artificial Sequence
  Chr8_6 Reverse Primer
aatgacttcggtggaaggtg

SEQ ID NO: 9380 - DNA, 25 bp, Artificial Sequence
  Chr8_6 Reverse Primer
gatgaaaaatagacacagagatggc

SEQ ID NO: 9381 - DNA, 20 bp, Artificial Sequence
  Chr8_6 Reverse Primer
ggcagcctgataccactgtt

SEQ ID NO: 9382 - DNA, 21 bp, Artificial Sequence
  Chr8_6 Reverse Primer
tggtaagctgtcagcattgaa

SEQ ID NO: 9383 - DNA, 20 bp, Artificial Sequence
  Chr8_6 Reverse Primer
ccttcacctaaagcattggc

SEQ ID NO: 9384 - DNA, 20 bp, Artificial Sequence
  Chr8_6 Reverse Primer
aggtgagtgtgaaaccccac

SEQ ID NO: 9385 - DNA, 23 bp, Artificial Sequence
  Chr8_6 Reverse Primer
gagcatgggctaataactgaaaa

SEQ ID NO: 9386 - DNA, 20 bp, Artificial Sequence
  Chr8_6 Reverse Primer
tgtgctagatgctggaggtg

SEQ ID NO: 9387 - DNA, 23 bp, Artificial Sequence
  Chr8_6 Reverse Primer
tctgggtcctgaaaatacagaaa

SEQ ID NO: 9388 - DNA, 24 bp, Artificial Sequence
  Chr8_6 Reverse Primer
tggtacataaatgcaacaatcaac

SEQ ID NO: 9389 - DNA, 21 bp, Artificial Sequence
  Chr8_6 Reverse Primer
gcaaaaattcttttcatggga

SEQ ID NO: 9390 - DNA, 20 bp, Artificial Sequence
  Chr8_6 Reverse Primer
ccaggcacagacactcagac

SEQ ID NO: 9391 - DNA, 22 bp, Artificial Sequence
  Chr8_6 Reverse Primer
aactcacccatccttttcttca

SEQ ID NO: 9392 - DNA, 20 bp, Artificial Sequence
  Chr8_6 Reverse Primer
taaaggtcagcctttgtgcc

SEQ ID NO: 9393 - DNA, 20 bp, Artificial Sequence
  Chr8_6 Reverse Primer
cagctttgcttttccctttg

SEQ ID NO: 9394 - DNA, 24 bp, Artificial Sequence
  Chr8_6 Reverse Primer
tctgtagttgtacagcggtctagt

SEQ ID NO: 9395 - DNA, 22 bp, Artificial Sequence
  Chr8_6 Reverse Primer
tccacaaagaatgcaaaatagc

SEQ ID NO: 9396 - DNA, 23 bp, Artificial Sequence
  Chr8_6 Reverse Primer
tttccattaaaaagcaaaatgtg

SEQ ID NO: 9397 - DNA, 20 bp, Artificial Sequence
  Chr8_6 Reverse Primer
agcaaagggaagggacaact

SEQ ID NO: 9398 - DNA, 21 bp, Artificial Sequence
  Chr8_6 Reverse Primer
tcatttaatcccaacaaccca

SEQ ID NO: 9399 - DNA, 23 bp, Artificial Sequence
  Chr8_6 Reverse Primer
tttccaggcacctaaaaatagaa

SEQ ID NO: 9400 - DNA, 20 bp, Artificial Sequence
  Chr8_6 Reverse Primer
aagcctaaacgaccacatgc

SEQ ID NO: 9401 - DNA, 21 bp, Artificial Sequence
  Chr8_6 Reverse Primer
tttattaaatgcatgggctgc

SEQ ID NO: 9402 - DNA, 20 bp, Artificial Sequence
  Chr8_6 Reverse Primer
aacctgggtgtcttccattg

SEQ ID NO: 9403 - DNA, 21 bp, Artificial Sequence
  Chr8_6 Reverse Primer
caagcatccattggtctcatt

SEQ ID NO: 9404 - DNA, 20 bp, Artificial Sequence
  Chr8_6 Reverse Primer
tttgctggttagtctccgct

SEQ ID NO: 9405 - DNA, 20 bp, Artificial Sequence
  Chr8_6 Reverse Primer
cgacggaaggaggaaggtat

SEQ ID NO: 9406 - DNA, 20 bp, Artificial Sequence
  Chr8_6 Reverse Primer
ggcaagcagagaagaaggtg

SEQ ID NO: 9407 - DNA, 20 bp, Artificial Sequence
  Chr8_6 Reverse Primer
aatacaagagtccagggcca

SEQ ID NO: 9408 - DNA, 20 bp, Artificial Sequence
  Chr8_6 Reverse Primer
tacatgacaccctggagctg

SEQ ID NO: 9409 - DNA, 20 bp, Artificial Sequence
  Chr8_6 Reverse Primer
ttttcttcctttgcccacat

SEQ ID NO: 9410 - DNA, 20 bp, Artificial Sequence
  Chr8_6 Reverse Primer
aagacaaccgagctgtggat

SEQ ID NO: 9411 - DNA, 20 bp, Artificial Sequence
  Chr8_6 Reverse Primer
tgcgtgtggagagagaagtg

SEQ ID NO: 9412 - DNA, 20 bp, Artificial Sequence
  Chr8_6 Reverse Primer
ctgaccatggggcactaaat

SEQ ID NO: 9413 - DNA, 22 bp, Artificial Sequence
  Chr8_6 Reverse Primer
gcagctagtcctatcatttggg

SEQ ID NO: 9414 - DNA, 20 bp, Artificial Sequence
  Chr8_6 Reverse Primer
ccctgaaggatttgctgaga

SEQ ID NO: 9415 - DNA, 20 bp, Artificial Sequence
  Chr8_6 Reverse Primer
ttggcaaatctaatgcctcc

SEQ ID NO: 9416 - DNA, 22 bp, Artificial Sequence
  Chr8_6 Reverse Primer
tttgctgctgtttattcagctc

SEQ ID NO: 9417 - DNA, 20 bp, Artificial Sequence
  Chr8_6 Reverse Primer
atgcccatttgaccaacaat

SEQ ID NO: 9418 - DNA, 20 bp, Artificial Sequence
  Chr8_6 Reverse Primer
attgcagcccatgctaaact

SEQ ID NO: 9419 - DNA, 23 bp, Artificial Sequence
  Chr8_6 Reverse Primer
cccaatttattttctctgagacc

SEQ ID NO: 9420 - DNA, 20 bp, Artificial Sequence
  Chr8_6 Reverse Primer
tactgaacatgccaacgagg

SEQ ID NO: 9421 - DNA, 20 bp, Artificial Sequence
  Chr8_6 Reverse Primer
tttcttttgtgactgctggg

SEQ ID NO: 9422 - DNA, 20 bp, Artificial Sequence
  Chr8_6 Reverse Primer
taggaccctcccaccctact

SEQ ID NO: 9423 - DNA, 20 bp, Artificial Sequence
  Chr8_6 Reverse Primer
ggtttgatgcactcacccat

SEQ ID NO: 9424 - DNA, 20 bp, Artificial Sequence
  Chr8_6 Reverse Primer
gatgctggaaggagaagtgg

SEQ ID NO: 9425 - DNA, 22 bp, Artificial Sequence
  Chr8_7 Forward Primer
cctttcctatcctgagatcggt

SEQ ID NO: 9426 - DNA, 20 bp, Artificial Sequence
  Chr8_7 Forward Primer
atctgcttttgcgctttcat

SEQ ID NO: 9427 - DNA, 20 bp, Artificial Sequence
  Chr8_7 Forward Primer
aataggggatctcacccacc

SEQ ID NO: 9428 - DNA, 20 bp, Artificial Sequence
  Chr8_7 Forward Primer
ccaccatcaccgtcatcata

SEQ ID NO: 9429 - DNA, 20 bp, Artificial Sequence
  Chr8_7 Forward Primer
cagacaccagcagttagcca

SEQ ID NO: 9430 - DNA, 26 bp, Artificial Sequence
  Chr8_7 Forward Primer
ctaaaatgttttgtaaaatagggacc

SEQ ID NO: 9431 - DNA, 20 bp, Artificial Sequence
  Chr8_7 Forward Primer
ccttgctttgtttgtcacca

SEQ ID NO: 9432 - DNA, 20 bp, Artificial Sequence
  Chr8_7 Forward Primer
aagtgcctgagcctgtcatc

SEQ ID NO: 9433 - DNA, 20 bp, Artificial Sequence
  Chr8_7 Forward Primer
gcttgctcaccattagaggc

SEQ ID NO: 9434 - DNA, 22 bp, Artificial Sequence
  Chr8_7 Forward Primer
tttggtcatccacataatgtcc

SEQ ID NO: 9435 - DNA, 21 bp, Artificial Sequence
  Chr8_7 Forward Primer
caggcatctgtctgtaagcaa

SEQ ID NO: 9436 - DNA, 20 bp, Artificial Sequence
  Chr8_7 Forward Primer
ccaaaaggcaaaatcttgaa

SEQ ID NO: 9437 - DNA, 22 bp, Artificial Sequence
  Chr8_7 Forward Primer
tcaaccttctcccaaatattgc

SEQ ID NO: 9438 - DNA, 20 bp, Artificial Sequence
  Chr8_7 Forward Primer
gccccataaaaagcttccat

SEQ ID NO: 9439 - DNA, 20 bp, Artificial Sequence
  Chr8_7 Forward Primer
agagaagttatgggcctggg

SEQ ID NO: 9440 - DNA, 20 bp, Artificial Sequence
  Chr8_7 Forward Primer
tgagtgccattgctccatag

SEQ ID NO: 9441 - DNA, 20 bp, Artificial Sequence
  Chr8_7 Forward Primer
catggaccaccctttgagaa

SEQ ID NO: 9442 - DNA, 20 bp, Artificial Sequence
  Chr8_7 Forward Primer
ccccaaagaaaactgcaaaa

SEQ ID NO: 9443 - DNA, 20 bp, Artificial Sequence
  Chr8_7 Forward Primer
agactactctccctgcccct

SEQ ID NO: 9444 - DNA, 23 bp, Artificial Sequence
  Chr8_7 Forward Primer
tcactatgattttcagttttggc

SEQ ID NO: 9445 - DNA, 20 bp, Artificial Sequence
  Chr8_7 Forward Primer
ctaagaacacccagaagcca

SEQ ID NO: 9446 - DNA, 22 bp, Artificial Sequence
  Chr8_7 Forward Primer
gcaaatctttgttctttcagcc

SEQ ID NO: 9447 - DNA, 22 bp, Artificial Sequence
  Chr8_7 Forward Primer
cctttcacaagcagttttacca

SEQ ID NO: 9448 - DNA, 20 bp, Artificial Sequence
  Chr8_7 Forward Primer
tctggctcactggaaaaggt

SEQ ID NO: 9449 - DNA, 20 bp, Artificial Sequence
  Chr8_7 Forward Primer
taggcatggcaatcaatcct

SEQ ID NO: 9450 - DNA, 22 bp, Artificial Sequence
  Chr8_7 Forward Primer
ttgaatgagaaccaagtccttt

SEQ ID NO: 9451 - DNA, 20 bp, Artificial Sequence
  Chr8_7 Forward Primer
gccatgaaaaatgcaacctc

SEQ ID NO: 9452 - DNA, 20 bp, Artificial Sequence
  Chr8_7 Forward Primer
catctacttcatcgcaggca

SEQ ID NO: 9453 - DNA, 20 bp, Artificial Sequence
  Chr8_7 Forward Primer
ttctgaagggcaaagaggag

SEQ ID NO: 9454 - DNA, 20 bp, Artificial Sequence
  Chr8_7 Forward Primer
aaatgcagagaacggactgg

SEQ ID NO: 9455 - DNA, 20 bp, Artificial Sequence
  Chr8_7 Forward Primer
aagacggaggagcaaattca

SEQ ID NO: 9456 - DNA, 21 bp, Artificial Sequence
  Chr8_7 Forward Primer
tttgcttggaacctgttgttc

SEQ ID NO: 9457 - DNA, 21 bp, Artificial Sequence
  Chr8_7 Forward Primer
caagttattttgcaaagccga

SEQ ID NO: 9458 - DNA, 24 bp, Artificial Sequence
  Chr8_7 Forward Primer
ttgggagtaaatattctgcctctt

SEQ ID NO: 9459 - DNA, 21 bp, Artificial Sequence
  Chr8_7 Forward Primer
gcatcttaggaaaacaggcag

SEQ ID NO: 9460 - DNA, 20 bp, Artificial Sequence
  Chr8_7 Forward Primer
actggtggaggactcctgtg

SEQ ID NO: 9461 - DNA, 20 bp, Artificial Sequence
  Chr8_7 Forward Primer
ggaactgaaacgttcccaaa

SEQ ID NO: 9462 - DNA, 20 bp, Artificial Sequence
  Chr8_7 Forward Primer
tctatttgtctgttccgggg

SEQ ID NO: 9463 - DNA, 20 bp, Artificial Sequence
  Chr8_7 Forward Primer
atttctccgagccaggaagt

SEQ ID NO: 9464 - DNA, 20 bp, Artificial Sequence
  Chr8_7 Forward Primer
atcactgcatgtttggggtt

SEQ ID NO: 9465 - DNA, 21 bp, Artificial Sequence
  Chr8_7 Forward Primer
ttggatcctctccatgacttg

SEQ ID NO: 9466 - DNA, 26 bp, Artificial Sequence
  Chr8_7 Forward Primer
tggtctttacatccaattaactttca

SEQ ID NO: 9467 - DNA, 20 bp, Artificial Sequence
  Chr8_7 Forward Primer
tgacctgcaaagctatcgaa

SEQ ID NO: 9468 - DNA, 20 bp, Artificial Sequence
  Chr8_7 Forward Primer
tttatggtcctggaggaagg

SEQ ID NO: 9469 - DNA, 20 bp, Artificial Sequence
  Chr8_7 Forward Primer
tcttactcctcctcccacga

SEQ ID NO: 9470 - DNA, 21 bp, Artificial Sequence
  Chr8_7 Forward Primer
tgcctcttcacttcctcatgt

SEQ ID NO: 9471 - DNA, 20 bp, Artificial Sequence
  Chr8_7 Forward Primer
cttagggcactgaggacagc

SEQ ID NO: 9472 - DNA, 22 bp, Artificial Sequence
  Chr8_7 Forward Primer
ggatttggtccatgtatatccc

SEQ ID NO: 9473 - DNA, 20 bp, Artificial Sequence
  Chr8_7 Forward Primer
gcactctcccactccacatt

SEQ ID NO: 9474 - DNA, 21 bp, Artificial Sequence
  Chr8_7 Forward Primer
cagtatggttgggaggattga

SEQ ID NO: 9475 - DNA, 20 bp, Artificial Sequence
  Chr8_7 Forward Primer
tgacacagctttgcaaggaa

SEQ ID NO: 9476 - DNA, 20 bp, Artificial Sequence
  Chr8_7 Forward Primer
cctgggctacctgagcataa

SEQ ID NO: 9477 - DNA, 20 bp, Artificial Sequence
  Chr8_7 Forward Primer
caggcttgcacttggtcata

SEQ ID NO: 9478 - DNA, 20 bp, Artificial Sequence
  Chr8_7 Forward Primer
ggtgtccaaaggccaaatag

SEQ ID NO: 9479 - DNA, 20 bp, Artificial Sequence
  Chr8_7 Forward Primer
tcctctgcaaagacctctga

SEQ ID NO: 9480 - DNA, 21 bp, Artificial Sequence
  Chr8_7 Forward Primer
aagctcagaaatcagcaacca

SEQ ID NO: 9481 - DNA, 20 bp, Artificial Sequence
  Chr8_7 Forward Primer
attttcctttggcttcaggc

SEQ ID NO: 9482 - DNA, 20 bp, Artificial Sequence
  Chr8_7 Forward Primer
tcaatgggaaaacttggctc

SEQ ID NO: 9483 - DNA, 20 bp, Artificial Sequence
  Chr8_7 Forward Primer
gctgctcaatgttatccggt

SEQ ID NO: 9484 - DNA, 20 bp, Artificial Sequence
  Chr8_7 Forward Primer
atgatctcattccgaccctg

SEQ ID NO: 9485 - DNA, 20 bp, Artificial Sequence
  Chr8_7 Forward Primer
tcagtcctcgatgtgagtgg

SEQ ID NO: 9486 - DNA, 20 bp, Artificial Sequence
  Chr8_7 Forward Primer
tttccacttgcccttgtttc

SEQ ID NO: 9487 - DNA, 20 bp, Artificial Sequence
  Chr8_7 Forward Primer
gcctcattcggtttgattgt

SEQ ID NO: 9488 - DNA, 20 bp, Artificial Sequence
  Chr8_7 Forward Primer
gggctgcaaaatcagacatt

SEQ ID NO: 9489 - DNA, 20 bp, Artificial Sequence
  Chr8_7 Forward Primer
cttttaattccagcccagca

SEQ ID NO: 9490 - DNA, 21 bp, Artificial Sequence
  Chr8_7 Forward Primer
gaagaagaggtcagacaggca

SEQ ID NO: 9491 - DNA, 20 bp, Artificial Sequence
  Chr8_7 Forward Primer
tgtatggtgtgccatgtgtg

SEQ ID NO: 9492 - DNA, 20 bp, Artificial Sequence
  Chr8_7 Forward Primer
tacagggctccgaaaatgtc

SEQ ID NO: 9493 - DNA, 20 bp, Artificial Sequence
  Chr8_7 Forward Primer
ttgaaattgtgctgcaatcc

SEQ ID NO: 9494 - DNA, 20 bp, Artificial Sequence
  Chr8_7 Forward Primer
gaaagcaagttttgtcccca

SEQ ID NO: 9495 - DNA, 21 bp, Artificial Sequence
  Chr8_7 Forward Primer
gctccaaagccatttattgtg

SEQ ID NO: 9496 - DNA, 20 bp, Artificial Sequence
  Chr8_7 Forward Primer
acagcagtgcctttctggat

SEQ ID NO: 9497 - DNA, 19 bp, Artificial Sequence
  Chr8_7 Forward Primer
tgtcagggattgtgccact

SEQ ID NO: 9498 - DNA, 20 bp, Artificial Sequence
  Chr8_7 Forward Primer
cccaccttcgcgtatacagt

SEQ ID NO: 9499 - DNA, 20 bp, Artificial Sequence
  Chr8_7 Forward Primer
aacacaggagggatcaatgc

SEQ ID NO: 9500 - DNA, 20 bp, Artificial Sequence
  Chr8_7 Forward Primer
ggtgccaacttcctcttctg

SEQ ID NO: 9501 - DNA, 20 bp, Artificial Sequence
  Chr8_7 Forward Primer
acaccaccatgggtagggta

SEQ ID NO: 9502 - DNA, 20 bp, Artificial Sequence
  Chr8_7 Forward Primer
ttcccagctacatgacccat

SEQ ID NO: 9503 - DNA, 21 bp, Artificial Sequence
  Chr8_7 Forward Primer
ggtttctccaaccttggattc

SEQ ID NO: 9504 - DNA, 20 bp, Artificial Sequence
  Chr8_7 Forward Primer
aaatagtgttgccactgggc

SEQ ID NO: 9505 - DNA, 20 bp, Artificial Sequence
  Chr8_7 Forward Primer
gggcattaggctatttccaa

SEQ ID NO: 9506 - DNA, 21 bp, Artificial Sequence
  Chr8_7 Forward Primer
tttctctgttctcatcccgaa

SEQ ID NO: 9507 - DNA, 20 bp, Artificial Sequence
  Chr8_7 Forward Primer
gtgggttcatttcccttcct

SEQ ID NO: 9508 - DNA, 24 bp, Artificial Sequence
  Chr8_7 Forward Primer
tctggtttttctctctagtggctt

SEQ ID NO: 9509 - DNA, 21 bp, Artificial Sequence
  Chr8_7 Forward Primer
gagctggaattacaggcatga

SEQ ID NO: 9510 - DNA, 20 bp, Artificial Sequence
  Chr8_7 Forward Primer
aagctcattgtggtgggaat

SEQ ID NO: 9511 - DNA, 20 bp, Artificial Sequence
  Chr8_7 Forward Primer
aggccttgacttccatctca

SEQ ID NO: 9512 - DNA, 20 bp, Artificial Sequence
  Chr8_7 Forward Primer
tgccaccttaagcaggattt

SEQ ID NO: 9513 - DNA, 22 bp, Artificial Sequence
  Chr8_7 Forward Primer
tgcatttttatcaatttctcgg

SEQ ID NO: 9514 - DNA, 24 bp, Artificial Sequence
  Chr8_7 Forward Primer
tttttatttgctatttttctggca

SEQ ID NO: 9515 - DNA, 21 bp, Artificial Sequence
  Chr8_7 Forward Primer
cctcagaccatctcttgtgga

SEQ ID NO: 9516 - DNA, 20 bp, Artificial Sequence
  Chr8_7 Forward Primer
tttccaccaagattttccca

SEQ ID NO: 9517 - DNA, 20 bp, Artificial Sequence
  Chr8_7 Forward Primer
tcctgaaaaattcccactgc

SEQ ID NO: 9518 - DNA, 25 bp, Artificial Sequence
  Chr8_7 Forward Primer
gcttcttaaagttccagagatgtca

SEQ ID NO: 9519 - DNA, 20 bp, Artificial Sequence
  Chr8_7 Forward Primer
tccagattcccctgatgcta

SEQ ID NO: 9520 - DNA, 20 bp, Artificial Sequence
  Chr8_7 Forward Primer
ccctttggagactgatgtgg

SEQ ID NO: 9521 - DNA, 24 bp, Artificial Sequence
  Chr8_7 Reverse Primer
tgtgtgtgtgtaaatttgacaggt

SEQ ID NO: 9522 - DNA, 20 bp, Artificial Sequence
  Chr8_7 Reverse Primer
gcccgattctctgtccttct

SEQ ID NO: 9523 - DNA, 20 bp, Artificial Sequence
  Chr8_7 Reverse Primer
atgggagctgtccacatacc

SEQ ID NO: 9524 - DNA, 20 bp, Artificial Sequence
  Chr8_7 Reverse Primer
cctgccttcactttcccttt

SEQ ID NO: 9525 - DNA, 20 bp, Artificial Sequence
  Chr8_7 Reverse Primer
taggaaaggaaacggacgtg

SEQ ID NO: 9526 - DNA, 20 bp, Artificial Sequence
  Chr8_7 Reverse Primer
actacttttgccatttgggc

SEQ ID NO: 9527 - DNA, 20 bp, Artificial Sequence
  Chr8_7 Reverse Primer
ggtgttccaacttcccttca

SEQ ID NO: 9528 - DNA, 20 bp, Artificial Sequence
  Chr8_7 Reverse Primer
caagcttttctgtgctctgg

SEQ ID NO: 9529 - DNA, 20 bp, Artificial Sequence
  Chr8_7 Reverse Primer
gcttgggatccaaaagtgaa

SEQ ID NO: 9530 - DNA, 20 bp, Artificial Sequence
  Chr8_7 Reverse Primer
tagaggcactggattcctgg

SEQ ID NO: 9531 - DNA, 20 bp, Artificial Sequence
  Chr8_7 Reverse Primer
gacactcggctggaaaacat

SEQ ID NO: 9532 - DNA, 20 bp, Artificial Sequence
  Chr8_7 Reverse Primer
tgtgctgcctcctctgtcta

SEQ ID NO: 9533 - DNA, 24 bp, Artificial Sequence
  Chr8_7 Reverse Primer
tccataaagaatcaagcaaaagaa

SEQ ID NO: 9534 - DNA, 20 bp, Artificial Sequence
  Chr8_7 Reverse Primer
caagcacaaaagctcacagg

SEQ ID NO: 9535 - DNA, 20 bp, Artificial Sequence
  Chr8_7 Reverse Primer
aaggaagagaggaaggcagg

SEQ ID NO: 9536 - DNA, 20 bp, Artificial Sequence
  Chr8_7 Reverse Primer
gtaacagaatccccaggcaa

SEQ ID NO: 9537 - DNA, 20 bp, Artificial Sequence
  Chr8_7 Reverse Primer
gcaagcttaagggtgaggtg

SEQ ID NO: 9538 - DNA, 20 bp, Artificial Sequence
  Chr8_7 Reverse Primer
cacacaatcatttgctccca

SEQ ID NO: 9539 - DNA, 20 bp, Artificial Sequence
  Chr8_7 Reverse Primer
atggtgctgaccagaaggag

SEQ ID NO: 9540 - DNA, 22 bp, Artificial Sequence
  Chr8_7 Reverse Primer
ctcatccattggtatgtgtgaa

SEQ ID NO: 9541 - DNA, 20 bp, Artificial Sequence
  Chr8_7 Reverse Primer
agacacacatccacaccctg

SEQ ID NO: 9542 - DNA, 20 bp, Artificial Sequence
  Chr8_7 Reverse Primer
tccaggtaaatattcggggt

SEQ ID NO: 9543 - DNA, 25 bp, Artificial Sequence
  Chr8_7 Reverse Primer
ggaaaaggtcagaattatatcagca

SEQ ID NO: 9544 - DNA, 21 bp, Artificial Sequence
  Chr8_7 Reverse Primer
gcactgaaatgtgcttgatga

SEQ ID NO: 9545 - DNA, 20 bp, Artificial Sequence
  Chr8_7 Reverse Primer
tgggtggcctaatactctgc

SEQ ID NO: 9546 - DNA, 21 bp, Artificial Sequence
  Chr8_7 Reverse Primer
cagggtcactgggtttcataa

SEQ ID NO: 9547 - DNA, 20 bp, Artificial Sequence
  Chr8_7 Reverse Primer
aagcaagcatgccaggtaat

SEQ ID NO: 9548 - DNA, 20 bp, Artificial Sequence
  Chr8_7 Reverse Primer
gtcaaagcagtcccacacaa

SEQ ID NO: 9549 - DNA, 23 bp, Artificial Sequence
  Chr8_7 Reverse Primer
cattagcatctagttgtcccagg

SEQ ID NO: 9550 - DNA, 20 bp, Artificial Sequence
  Chr8_7 Reverse Primer
tttcccacgctagaaacctg

SEQ ID NO: 9551 - DNA, 20 bp, Artificial Sequence
  Chr8_7 Reverse Primer
tgtgctcacaccttcaatgc

SEQ ID NO: 9552 - DNA, 20 bp, Artificial Sequence
  Chr8_7 Reverse Primer
aattccttctccaaaagccc

SEQ ID NO: 9553 - DNA, 24 bp, Artificial Sequence
  Chr8_7 Reverse Primer
tggtaatgctttctcatacaaaat

SEQ ID NO: 9554 - DNA, 20 bp, Artificial Sequence
  Chr8_7 Reverse Primer
tgatttctccaccaaaatgg

SEQ ID NO: 9555 - DNA, 20 bp, Artificial Sequence
  Chr8_7 Reverse Primer
ggctgaaaacttgacctcca

SEQ ID NO: 9556 - DNA, 20 bp, Artificial Sequence
  Chr8_7 Reverse Primer
actcacaggcctggatatgg

SEQ ID NO: 9557 - DNA, 23 bp, Artificial Sequence
  Chr8_7 Reverse Primer
gatacaaagaaagtctgggcaaa

SEQ ID NO: 9558 - DNA, 20 bp, Artificial Sequence
  Chr8_7 Reverse Primer
tcggggttttcattcagttc

SEQ ID NO: 9559 - DNA, 20 bp, Artificial Sequence
  Chr8_7 Reverse Primer
actctgatcccaattggctg

SEQ ID NO: 9560 - DNA, 22 bp, Artificial Sequence
  Chr8_7 Reverse Primer
agtgaatgacccactttgatga

SEQ ID NO: 9561 - DNA, 20 bp, Artificial Sequence
  Chr8_7 Reverse Primer
aggatggctcctggatttct

SEQ ID NO: 9562 - DNA, 20 bp, Artificial Sequence
  Chr8_7 Reverse Primer
caccctggctacggtgtaac

SEQ ID NO: 9563 - DNA, 20 bp, Artificial Sequence
  Chr8_7 Reverse Primer
gatggctgtctctcctttgg

SEQ ID NO: 9564 - DNA, 20 bp, Artificial Sequence
  Chr8_7 Reverse Primer
atgcaaagttctcaggtggg

SEQ ID NO: 9565 - DNA, 20 bp, Artificial Sequence
  Chr8_7 Reverse Primer
ggttaaacccatgtctcccc

SEQ ID NO: 9566 - DNA, 20 bp, Artificial Sequence
  Chr8_7 Reverse Primer
gaaacacggaaaggtagccc

SEQ ID NO: 9567 - DNA, 19 bp, Artificial Sequence
  Chr8_7 Reverse Primer
gtgccatttttgggaggac

SEQ ID NO: 9568 - DNA, 20 bp, Artificial Sequence
  Chr8_7 Reverse Primer
agcttcacattcatgagcca

SEQ ID NO: 9569 - DNA, 20 bp, Artificial Sequence
  Chr8_7 Reverse Primer
tgagtttcagggaggttgct

SEQ ID NO: 9570 - DNA, 20 bp, Artificial Sequence
  Chr8_7 Reverse Primer
attgccccattccaattttc

SEQ ID NO: 9571 - DNA, 20 bp, Artificial Sequence
  Chr8_7 Reverse Primer
cgggatagtgtttcccattg

SEQ ID NO: 9572 - DNA, 20 bp, Artificial Sequence
  Chr8_7 Reverse Primer
tacataccaagctggggagc

SEQ ID NO: 9573 - DNA, 20 bp, Artificial Sequence
  Chr8_7 Reverse Primer
ttaattcttgcaacagcccc

SEQ ID NO: 9574 - DNA, 20 bp, Artificial Sequence
  Chr8_7 Reverse Primer
ttcccatttactgagcacca

SEQ ID NO: 9575 - DNA, 20 bp, Artificial Sequence
  Chr8_7 Reverse Primer
caaggttcttggggaccata

SEQ ID NO: 9576 - DNA, 20 bp, Artificial Sequence
  Chr8_7 Reverse Primer
tcttcaatccaacctttcgg

SEQ ID NO: 9577 - DNA, 21 bp, Artificial Sequence
  Chr8_7 Reverse Primer
aactgccaaatggttatgagc

SEQ ID NO: 9578 - DNA, 20 bp, Artificial Sequence
  Chr8_7 Reverse Primer
aagcactaagcccagactgc

SEQ ID NO: 9579 - DNA, 20 bp, Artificial Sequence
  Chr8_7 Reverse Primer
tggcacaaaagcacctaaca

SEQ ID NO: 9580 - DNA, 20 bp, Artificial Sequence
  Chr8_7 Reverse Primer
atcactgcctgagtcccatt

SEQ ID NO: 9581 - DNA, 20 bp, Artificial Sequence
  Chr8_7 Reverse Primer
caaccttggaaccttcagga

SEQ ID NO: 9582 - DNA, 20 bp, Artificial Sequence
  Chr8_7 Reverse Primer
ctcatctcccactgccaaat

SEQ ID NO: 9583 - DNA, 20 bp, Artificial Sequence
  Chr8_7 Reverse Primer
gtgggaagggcagacagtta

SEQ ID NO: 9584 - DNA, 23 bp, Artificial Sequence
  Chr8_7 Reverse Primer
cagataattagggcagacattgg

SEQ ID NO: 9585 - DNA, 20 bp, Artificial Sequence
  Chr8_7 Reverse Primer
tcttgccaaggtcacaacac

SEQ ID NO: 9586 - DNA, 20 bp, Artificial Sequence
  Chr8_7 Reverse Primer
ccggaatcaaggcacattat

SEQ ID NO: 9587 - DNA, 20 bp, Artificial Sequence
  Chr8_7 Reverse Primer
tctgtgggaaagatggcttc

SEQ ID NO: 9588 - DNA, 20 bp, Artificial Sequence
  Chr8_7 Reverse Primer
gcccttggacttctagccat

SEQ ID NO: 9589 - DNA, 20 bp, Artificial Sequence
  Chr8_7 Reverse Primer
gcttcagtgcaagaaaaggc

SEQ ID NO: 9590 - DNA, 20 bp, Artificial Sequence
  Chr8_7 Reverse Primer
ttcccagtggctgtttaagg

SEQ ID NO: 9591 - DNA, 22 bp, Artificial Sequence
  Chr8_7 Reverse Primer
cagggactattggagataggga

SEQ ID NO: 9592 - DNA, 20 bp, Artificial Sequence
  Chr8_7 Reverse Primer
ggcagcatgaagaaggagag

SEQ ID NO: 9593 - DNA, 20 bp, Artificial Sequence
  Chr8_7 Reverse Primer
gaggagcagaaggggagagt

SEQ ID NO: 9594 - DNA, 20 bp, Artificial Sequence
  Chr8_7 Reverse Primer
atggtgtgcccttttgtctc

SEQ ID NO: 9595 - DNA, 20 bp, Artificial Sequence
  Chr8_7 Reverse Primer
tggtttgggcttttcattgt

SEQ ID NO: 9596 - DNA, 20 bp, Artificial Sequence
  Chr8_7 Reverse Primer
aagccattcacaaagcttcc

SEQ ID NO: 9597 - DNA, 20 bp, Artificial Sequence
  Chr8_7 Reverse Primer
gtgtgttttgaaccagccct

SEQ ID NO: 9598 - DNA, 20 bp, Artificial Sequence
  Chr8_7 Reverse Primer
tccccatggtttctcaccta

SEQ ID NO: 9599 - DNA, 20 bp, Artificial Sequence
  Chr8_7 Reverse Primer
ccttgctcaaagacaaagcc

SEQ ID NO: 9600 - DNA, 20 bp, Artificial Sequence
  Chr8_7 Reverse Primer
ggtgacccttgtcaatgtcc

SEQ ID NO: 9601 - DNA, 20 bp, Artificial Sequence
  Chr8_7 Reverse Primer
tgctaaggagaaatgggtgc

SEQ ID NO: 9602 - DNA, 20 bp, Artificial Sequence
  Chr8_7 Reverse Primer
ggcttcatagtgggcaaaga

SEQ ID NO: 9603 - DNA, 22 bp, Artificial Sequence
  Chr8_7 Reverse Primer
gcaattagactgacaacacgct

SEQ ID NO: 9604 - DNA, 21 bp, Artificial Sequence
  Chr8_7 Reverse Primer
ttctcccttgttcagctctgt

SEQ ID NO: 9605 - DNA, 25 bp, Artificial Sequence
  Chr8_7 Reverse Primer
gctaattgaataatctggaagaaaa

SEQ ID NO: 9606 - DNA, 20 bp, Artificial Sequence
  Chr8_7 Reverse Primer
gggggaaataatgagccaaa

SEQ ID NO: 9607 - DNA, 20 bp, Artificial Sequence
  Chr8_7 Reverse Primer
cctttccccaatcaaacaga

SEQ ID NO: 9608 - DNA, 23 bp, Artificial Sequence
  Chr8_7 Reverse Primer
agcttatgacagaccatatgcaa

SEQ ID NO: 9609 - DNA, 20 bp, Artificial Sequence
  Chr8_7 Reverse Primer
aaggtgatcaaaggcagagc

SEQ ID NO: 9610 - DNA, 26 bp, Artificial Sequence
  Chr8_7 Reverse Primer
ttttgtaatagaaacccaaatgaact

SEQ ID NO: 9611 - DNA, 23 bp, Artificial Sequence
  Chr8_7 Reverse Primer
gcagagatgggtttaaatgtttg

SEQ ID NO: 9612 - DNA, 20 bp, Artificial Sequence
  Chr8_7 Reverse Primer
tagcaaaccaccgcagaact

SEQ ID NO: 9613 - DNA, 20 bp, Artificial Sequence
  Chr8_7 Reverse Primer
caccctggtaggaggaactg

SEQ ID NO: 9614 - DNA, 21 bp, Artificial Sequence
  Chr8_7 Reverse Primer
gggattgcaatgctaacttga

SEQ ID NO: 9615 - DNA, 20 bp, Artificial Sequence
  Chr8_7 Reverse Primer
ctgtgccaggggatgtttag

SEQ ID NO: 9616 - DNA, 20 bp, Artificial Sequence
  Chr8_7 Reverse Primer
tctaggcacccagagcaaac

SEQ ID NO: 9617 - DNA, 20 bp, Artificial Sequence
  Chr8_8 Forward Primer
tcacctgcccctaattcatc

SEQ ID NO: 9618 - DNA, 20 bp, Artificial Sequence
  Chr8_8 Forward Primer
tccactccaagacaccttcc

SEQ ID NO: 9619 - DNA, 22 bp, Artificial Sequence
  Chr8_8 Forward Primer
aaatgatccagagagcttgagt

SEQ ID NO: 9620 - DNA, 20 bp, Artificial Sequence
  Chr8_8 Forward Primer
atgacttggcgagtctgctt

SEQ ID NO: 9621 - DNA, 20 bp, Artificial Sequence
  Chr8_8 Forward Primer
gctgctcattggctctgttt

SEQ ID NO: 9622 - DNA, 20 bp, Artificial Sequence
  Chr8_8 Forward Primer
aatcatttcctggggttgtg

SEQ ID NO: 9623 - DNA, 20 bp, Artificial Sequence
  Chr8_8 Forward Primer
cagccatatctgactgccaa

SEQ ID NO: 9624 - DNA, 20 bp, Artificial Sequence
  Chr8_8 Forward Primer
gccatcatcagaatttgcct

SEQ ID NO: 9625 - DNA, 20 bp, Artificial Sequence
  Chr8_8 Forward Primer
taaacaccagggaaaaggca

SEQ ID NO: 9626 - DNA, 20 bp, Artificial Sequence
  Chr8_8 Forward Primer
gcctgtatttcccttccctc

SEQ ID NO: 9627 - DNA, 20 bp, Artificial Sequence
  Chr8_8 Forward Primer
ctctgccagacagatcacca

SEQ ID NO: 9628 - DNA, 20 bp, Artificial Sequence
  Chr8_8 Forward Primer
tccaaggcccatgactaaag

SEQ ID NO: 9629 - DNA, 20 bp, Artificial Sequence
  Chr8_8 Forward Primer
tgttccactgcgtgagatgt

SEQ ID NO: 9630 - DNA, 20 bp, Artificial Sequence
  Chr8_8 Forward Primer
ttaggccccaataacactgc

SEQ ID NO: 9631 - DNA, 20 bp, Artificial Sequence
  Chr8_8 Forward Primer
tgatctctggccaccaaaat

SEQ ID NO: 9632 - DNA, 21 bp, Artificial Sequence
  Chr8_8 Forward Primer
acttttgttctcttttgcccc

SEQ ID NO: 9633 - DNA, 20 bp, Artificial Sequence
  Chr8_8 Forward Primer
ccaccaatgcctttgagttt

SEQ ID NO: 9634 - DNA, 21 bp, Artificial Sequence
  Chr8_8 Forward Primer
gcaatattctctgttgggctg

SEQ ID NO: 9635 - DNA, 20 bp, Artificial Sequence
  Chr8_8 Forward Primer
acactgtgctaggtccaggg

SEQ ID NO: 9636 - DNA, 20 bp, Artificial Sequence
  Chr8_8 Forward Primer
actcaagaaggcaggaccaa

SEQ ID NO: 9637 - DNA, 18 bp, Artificial Sequence
  Chr8_8 Forward Primer
cagaccattggagctcgg

SEQ ID NO: 9638 - DNA, 20 bp, Artificial Sequence
  Chr8_8 Forward Primer
agcaagttcacccacaaagg

SEQ ID NO: 9639 - DNA, 20 bp, Artificial Sequence
  Chr8_8 Forward Primer
accatccctctcccactctt

SEQ ID NO: 9640 - DNA, 19 bp, Artificial Sequence
  Chr8_8 Forward Primer
cccttgcctagcctgaaac

SEQ ID NO: 9641 - DNA, 20 bp, Artificial Sequence
  Chr8_8 Forward Primer
cccttttccacctcttgaca

SEQ ID NO: 9642 - DNA, 20 bp, Artificial Sequence
  Chr8_8 Forward Primer
gaagactttcccaattgccc

SEQ ID NO: 9643 - DNA, 20 bp, Artificial Sequence
  Chr8_8 Forward Primer
atttctgtcctggccacact

SEQ ID NO: 9644 - DNA, 20 bp, Artificial Sequence
  Chr8_8 Forward Primer
gtcccaactttcctgtgtgg

SEQ ID NO: 9645 - DNA, 21 bp, Artificial Sequence
  Chr8_8 Forward Primer
tcaggggtggtttcttattcc

SEQ ID NO: 9646 - DNA, 25 bp, Artificial Sequence
  Chr8_8 Forward Primer
tgagggaatggataaagataaactg

SEQ ID NO: 9647 - DNA, 20 bp, Artificial Sequence
  Chr8_8 Forward Primer
cgcccgaatcagtaaaaaga

SEQ ID NO: 9648 - DNA, 20 bp, Artificial Sequence
  Chr8_8 Forward Primer
tctcaaaccatgaggcagaa

SEQ ID NO: 9649 - DNA, 20 bp, Artificial Sequence
  Chr8_8 Forward Primer
tcttaaaggagggcaggaaa

SEQ ID NO: 9650 - DNA, 21 bp, Artificial Sequence
  Chr8_8 Forward Primer
tggtaaatcacgactgctcct

SEQ ID NO: 9651 - DNA, 20 bp, Artificial Sequence
  Chr8_8 Forward Primer
ttcagggtcctccacagttt

SEQ ID NO: 9652 - DNA, 20 bp, Artificial Sequence
  Chr8_8 Forward Primer
ccttcttgagaatgaagccc

SEQ ID NO: 9653 - DNA, 20 bp, Artificial Sequence
  Chr8_8 Forward Primer
tcaactttcacacaagggca

SEQ ID NO: 9654 - DNA, 20 bp, Artificial Sequence
  Chr8_8 Forward Primer
taaatcagccaaaaagccca

SEQ ID NO: 9655 - DNA, 20 bp, Artificial Sequence
  Chr8_8 Forward Primer
tgggaaaatggcttacttgc

SEQ ID NO: 9656 - DNA, 20 bp, Artificial Sequence
  Chr8_8 Forward Primer
tagccagtggacattgagca

SEQ ID NO: 9657 - DNA, 20 bp, Artificial Sequence
  Chr8_8 Forward Primer
tcatttcttctcacctgggg

SEQ ID NO: 9658 - DNA, 26 bp, Artificial Sequence
  Chr8_8 Forward Primer
tccaattattcctttaccatcttacc

SEQ ID NO: 9659 - DNA, 20 bp, Artificial Sequence
  Chr8_8 Forward Primer
atggacagcccatagcaact

SEQ ID NO: 9660 - DNA, 20 bp, Artificial Sequence
  Chr8_8 Forward Primer
gtgaacacttgtgtccctgc

SEQ ID NO: 9661 - DNA, 23 bp, Artificial Sequence
  Chr8_8 Forward Primer
tttgacaaaaaggattctttcca

SEQ ID NO: 9662 - DNA, 22 bp, Artificial Sequence
  Chr8_8 Forward Primer
ccccaaatctgtaaaactagca

SEQ ID NO: 9663 - DNA, 23 bp, Artificial Sequence
  Chr8_8 Forward Primer
cgcttagagtgaaagagaggaga

SEQ ID NO: 9664 - DNA, 20 bp, Artificial Sequence
  Chr8_8 Forward Primer
ggagggaaccagaggtttct

SEQ ID NO: 9665 - DNA, 20 bp, Artificial Sequence
  Chr8_8 Forward Primer
cacactggactccttgctga

SEQ ID NO: 9666 - DNA, 20 bp, Artificial Sequence
  Chr8_8 Forward Primer
atttcacagtaacaccgccc

SEQ ID NO: 9667 - DNA, 20 bp, Artificial Sequence
  Chr8_8 Forward Primer
gtttgctagggaatggcatc

SEQ ID NO: 9668 - DNA, 24 bp, Artificial Sequence
  Chr8_8 Forward Primer
gcaaaacatagagaatggtcatca

SEQ ID NO: 9669 - DNA, 22 bp, Artificial Sequence
  Chr8_8 Forward Primer
cacaatgtcccttaatcttcca

SEQ ID NO: 9670 - DNA, 23 bp, Artificial Sequence
  Chr8_8 Forward Primer
acaccaagaaaaacaaatccaga

SEQ ID NO: 9671 - DNA, 21 bp, Artificial Sequence
  Chr8_8 Forward Primer
gctctgatttttgcttgctca

SEQ ID NO: 9672 - DNA, 20 bp, Artificial Sequence
  Chr8_8 Forward Primer
ccttcgaaagaacctttccc

SEQ ID NO: 9673 - DNA, 20 bp, Artificial Sequence
  Chr8_8 Forward Primer
acaattcacagaggggttgg

SEQ ID NO: 9674 - DNA, 22 bp, Artificial Sequence
  Chr8_8 Forward Primer
tctggcagcagacttaagaaga

SEQ ID NO: 9675 - DNA, 24 bp, Artificial Sequence
  Chr8_8 Forward Primer
cgacctaattaatttctattgggc

SEQ ID NO: 9676 - DNA, 20 bp, Artificial Sequence
  Chr8_8 Forward Primer
cacgccagagaagtttgtca

SEQ ID NO: 9677 - DNA, 21 bp, Artificial Sequence
  Chr8_8 Forward Primer
ccagtttggttgaggagatca

SEQ ID NO: 9678 - DNA, 23 bp, Artificial Sequence
  Chr8_8 Forward Primer
ggagacaacttgccaataaaatg

SEQ ID NO: 9679 - DNA, 20 bp, Artificial Sequence
  Chr8_8 Forward Primer
tgaagtcaaagcccaaaagg

SEQ ID NO: 9680 - DNA, 24 bp, Artificial Sequence
  Chr8_8 Forward Primer
tggaataaaaatcaaagcatctca

SEQ ID NO: 9681 - DNA, 21 bp, Artificial Sequence
  Chr8_8 Forward Primer
tgctctgagtcatcaaggtcc

SEQ ID NO: 9682 - DNA, 26 bp, Artificial Sequence
  Chr8_8 Forward Primer
tatacgtggatcaaagtaggtatttc

SEQ ID NO: 9683 - DNA, 20 bp, Artificial Sequence
  Chr8_8 Forward Primer
aaggcagacactcaccttcg

SEQ ID NO: 9684 - DNA, 21 bp, Artificial Sequence
  Chr8_8 Forward Primer
agccagtcacatgaagctttt

SEQ ID NO: 9685 - DNA, 21 bp, Artificial Sequence
  Chr8_8 Forward Primer
ttaatgggtctccaaaccaaa

SEQ ID NO: 9686 - DNA, 21 bp, Artificial Sequence
  Chr8_8 Forward Primer
ccagttaaatgccctctgaaa

SEQ ID NO: 9687 - DNA, 20 bp, Artificial Sequence
  Chr8_8 Forward Primer
gctcctcaccctatcaggtc

SEQ ID NO: 9688 - DNA, 20 bp, Artificial Sequence
  Chr8_8 Forward Primer
cgaggctcctattccctttc

SEQ ID NO: 9689 - DNA, 20 bp, Artificial Sequence
  Chr8_8 Forward Primer
ctgcagcagtgaaaggcata

SEQ ID NO: 9690 - DNA, 20 bp, Artificial Sequence
  Chr8_8 Forward Primer
atcctccagcatcctcagaa

SEQ ID NO: 9691 - DNA, 21 bp, Artificial Sequence
  Chr8_8 Forward Primer
tgcctggtaaaccagaaaatg

SEQ ID NO: 9692 - DNA, 20 bp, Artificial Sequence
  Chr8_8 Forward Primer
ataaagctcaggtgaggcca

SEQ ID NO: 9693 - DNA, 20 bp, Artificial Sequence
  Chr8_8 Forward Primer
cgtgataacaaccttctgcg

SEQ ID NO: 9694 - DNA, 22 bp, Artificial Sequence
  Chr8_8 Forward Primer
gctggaaagtacaatgttggaa

SEQ ID NO: 9695 - DNA, 20 bp, Artificial Sequence
  Chr8_8 Forward Primer
catcgtggtccaggaaaaat

SEQ ID NO: 9696 - DNA, 22 bp, Artificial Sequence
  Chr8_8 Forward Primer
cacattttctgctttacaccca

SEQ ID NO: 9697 - DNA, 25 bp, Artificial Sequence
  Chr8_8 Forward Primer
aatgaggtcttttaagtttgccttt

SEQ ID NO: 9698 - DNA, 20 bp, Artificial Sequence
  Chr8_8 Forward Primer
aatctcagcagcacagagca

SEQ ID NO: 9699 - DNA, 22 bp, Artificial Sequence
  Chr8_8 Forward Primer
tggcatcattgttgtaatgaaa

SEQ ID NO: 9700 - DNA, 20 bp, Artificial Sequence
  Chr8_8 Forward Primer
aaccacatggatgctaccaa

SEQ ID NO: 9701 - DNA, 20 bp, Artificial Sequence
  Chr8_8 Forward Primer
ggcctctatgtctgtcaccg

SEQ ID NO: 9702 - DNA, 22 bp, Artificial Sequence
  Chr8_8 Forward Primer
cgtttgcctaaattcaatgaca

SEQ ID NO: 9703 - DNA, 23 bp, Artificial Sequence
  Chr8_8 Forward Primer
cgtttgggaaatttattaaagca

SEQ ID NO: 9704 - DNA, 20 bp, Artificial Sequence
  Chr8_8 Forward Primer
tccctgcaagaatatggtcc

SEQ ID NO: 9705 - DNA, 20 bp, Artificial Sequence
  Chr8_8 Forward Primer
tagttttgctcctggatggg

SEQ ID NO: 9706 - DNA, 20 bp, Artificial Sequence
  Chr8_8 Forward Primer
aggccctgaaacttagggaa

SEQ ID NO: 9707 - DNA, 23 bp, Artificial Sequence
  Chr8_8 Forward Primer
tggtttttggaaaagattcatgt

SEQ ID NO: 9708 - DNA, 20 bp, Artificial Sequence
  Chr8_8 Forward Primer
gacctgtgccaacattcaaa

SEQ ID NO: 9709 - DNA, 20 bp, Artificial Sequence
  Chr8_8 Forward Primer
aaatgaaagcaccattccga

SEQ ID NO: 9710 - DNA, 20 bp, Artificial Sequence
  Chr8_8 Forward Primer
gccaggtcaaaacacagttg

SEQ ID NO: 9711 - DNA, 24 bp, Artificial Sequence
  Chr8_8 Forward Primer
ttgcaaccacatttatttctaagc

SEQ ID NO: 9712 - DNA, 23 bp, Artificial Sequence
  Chr8_8 Forward Primer
ttcctgaagcaaaattagatgga

SEQ ID NO: 9713 - DNA, 20 bp, Artificial Sequence
  Chr8_8 Reverse Primer
gttcagggttcctggtgtgt

SEQ ID NO: 9714 - DNA, 20 bp, Artificial Sequence
  Chr8_8 Reverse Primer
ttgacttttgcttggcaatg

SEQ ID NO: 9715 - DNA, 21 bp, Artificial Sequence
  Chr8_8 Reverse Primer
aaggtggttgtgagaatgtga

SEQ ID NO: 9716 - DNA, 21 bp, Artificial Sequence
  Chr8_8 Reverse Primer
tgtgaagaagtggttgctgaa

SEQ ID NO: 9717 - DNA, 22 bp, Artificial Sequence
  Chr8_8 Reverse Primer
ttgtttcctaaggggaaagaac

SEQ ID NO: 9718 - DNA, 20 bp, Artificial Sequence
  Chr8_8 Reverse Primer
tggtgcattaaatcaagccc

SEQ ID NO: 9719 - DNA, 20 bp, Artificial Sequence
  Chr8_8 Reverse Primer
caggggagtggattgcttta

SEQ ID NO: 9720 - DNA, 20 bp, Artificial Sequence
  Chr8_8 Reverse Primer
ttctccatcatcttttcccg

SEQ ID NO: 9721 - DNA, 21 bp, Artificial Sequence
  Chr8_8 Reverse Primer
aatccagcagagtgatttcca

SEQ ID NO: 9722 - DNA, 20 bp, Artificial Sequence
  Chr8_8 Reverse Primer
tgctttatgtgtatggggca

SEQ ID NO: 9723 - DNA, 21 bp, Artificial Sequence
  Chr8_8 Reverse Primer
gcatgggaaacaagaagacaa

SEQ ID NO: 9724 - DNA, 20 bp, Artificial Sequence
  Chr8_8 Reverse Primer
tcttttcctgacagttgggc

SEQ ID NO: 9725 - DNA, 20 bp, Artificial Sequence
  Chr8_8 Reverse Primer
aattgaatgtgcctcttggg

SEQ ID NO: 9726 - DNA, 20 bp, Artificial Sequence
  Chr8_8 Reverse Primer
tcaggtccctggtgatcaaa

SEQ ID NO: 9727 - DNA, 21 bp, Artificial Sequence
  Chr8_8 Reverse Primer
tcctttttagatgggtggctt

SEQ ID NO: 9728 - DNA, 20 bp, Artificial Sequence
  Chr8_8 Reverse Primer
agtagcaagttgcccagcat

SEQ ID NO: 9729 - DNA, 27 bp, Artificial Sequence
  Chr8_8 Reverse Primer
gatgatgatgaatatagttttagctcc

SEQ ID NO: 9730 - DNA, 22 bp, Artificial Sequence
  Chr8_8 Reverse Primer
tctcacctgagtattcacccac

SEQ ID NO: 9731 - DNA, 20 bp, Artificial Sequence
  Chr8_8 Reverse Primer
cctcatggctgatcttggat

SEQ ID NO: 9732 - DNA, 21 bp, Artificial Sequence
  Chr8_8 Reverse Primer
cgaaggaagatggttttctca

SEQ ID NO: 9733 - DNA, 27 bp, Artificial Sequence
  Chr8_8 Reverse Primer
tggtgaaaaatataactaatcaaatgg

SEQ ID NO: 9734 - DNA, 20 bp, Artificial Sequence
  Chr8_8 Reverse Primer
tgagtttgtgccaagcaaag

SEQ ID NO: 9735 - DNA, 20 bp, Artificial Sequence
  Chr8_8 Reverse Primer
agggatttggaaagatggct

SEQ ID NO: 9736 - DNA, 19 bp, Artificial Sequence
  Chr8_8 Reverse Primer
aagtggacttggccagcat

SEQ ID NO: 9737 - DNA, 20 bp, Artificial Sequence
  Chr8_8 Reverse Primer
ccatggaaaactgggaaatg

SEQ ID NO: 9738 - DNA, 22 bp, Artificial Sequence
  Chr8_8 Reverse Primer
tgcagacaagaaggagatgaaa

SEQ ID NO: 9739 - DNA, 20 bp, Artificial Sequence
  Chr8_8 Reverse Primer
ctgaagaccctacagccagg

SEQ ID NO: 9740 - DNA, 21 bp, Artificial Sequence
  Chr8_8 Reverse Primer
gaaccttgaagaaactgtggg

SEQ ID NO: 9741 - DNA, 20 bp, Artificial Sequence
  Chr8_8 Reverse Primer
aaacgttgggctaagtcctg

SEQ ID NO: 9742 - DNA, 26 bp, Artificial Sequence
  Chr8_8 Reverse Primer
aacataactgacacatgtcctgtaaa

SEQ ID NO: 9743 - DNA, 20 bp, Artificial Sequence
  Chr8_8 Reverse Primer
tgtcattgaatccaacccgt

SEQ ID NO: 9744 - DNA, 23 bp, Artificial Sequence
  Chr8_8 Reverse Primer
tgaagcagaaataatcaaatggg

SEQ ID NO: 9745 - DNA, 22 bp, Artificial Sequence
  Chr8_8 Reverse Primer
ccaacccataagtaattgcaca

SEQ ID NO: 9746 - DNA, 20 bp, Artificial Sequence
  Chr8_8 Reverse Primer
gggctgatatggtggaagtg

SEQ ID NO: 9747 - DNA, 20 bp, Artificial Sequence
  Chr8_8 Reverse Primer
cagcttcaaggaggagatgg

SEQ ID NO: 9748 - DNA, 20 bp, Artificial Sequence
  Chr8_8 Reverse Primer
taccaaaggtccgcaaattc

SEQ ID NO: 9749 - DNA, 26 bp, Artificial Sequence
  Chr8_8 Reverse Primer
aattgtagagtccagatgataggttt

SEQ ID NO: 9750 - DNA, 20 bp, Artificial Sequence
  Chr8_8 Reverse Primer
ccagctcatctgcttccaat

SEQ ID NO: 9751 - DNA, 20 bp, Artificial Sequence
  Chr8_8 Reverse Primer
ctcctttgggatcctgcata

SEQ ID NO: 9752 - DNA, 20 bp, Artificial Sequence
  Chr8_8 Reverse Primer
cctctgtttgaagctctgcc

SEQ ID NO: 9753 - DNA, 21 bp, Artificial Sequence
  Chr8_8 Reverse Primer
caaagatgatgatgaagggct

SEQ ID NO: 9754 - DNA, 21 bp, Artificial Sequence
  Chr8_8 Reverse Primer
tgttgcctgttttgaatttga

SEQ ID NO: 9755 - DNA, 20 bp, Artificial Sequence
  Chr8_8 Reverse Primer
tgggaggattggcaataaag

SEQ ID NO: 9756 - DNA, 20 bp, Artificial Sequence
  Chr8_8 Reverse Primer
acatggactccccagtagca

SEQ ID NO: 9757 - DNA, 20 bp, Artificial Sequence
  Chr8_8 Reverse Primer
catgcctccagtatcccatt

SEQ ID NO: 9758 - DNA, 20 bp, Artificial Sequence
  Chr8_8 Reverse Primer
tttccatttttggtttgggt

SEQ ID NO: 9759 - DNA, 25 bp, Artificial Sequence
  Chr8_8 Reverse Primer
agatatgtgaaccttagtgaatggt

SEQ ID NO: 9760 - DNA, 20 bp, Artificial Sequence
  Chr8_8 Reverse Primer
gattgcctgcaactaggctc

SEQ ID NO: 9761 - DNA, 20 bp, Artificial Sequence
  Chr8_8 Reverse Primer
cagttttgctgctgctcaga

SEQ ID NO: 9762 - DNA, 20 bp, Artificial Sequence
  Chr8_8 Reverse Primer
gagtccttcctgtggtccag

SEQ ID NO: 9763 - DNA, 20 bp, Artificial Sequence
  Chr8_8 Reverse Primer
taccagtggcatctgagtgg

SEQ ID NO: 9764 - DNA, 21 bp, Artificial Sequence
  Chr8_8 Reverse Primer
tgtaaccacagaattggcctc

SEQ ID NO: 9765 - DNA, 26 bp, Artificial Sequence
  Chr8_8 Reverse Primer
ttttaagaaacctgatttacaagaaa

SEQ ID NO: 9766 - DNA, 20 bp, Artificial Sequence
  Chr8_8 Reverse Primer
tatcagatttccaaggtggg

SEQ ID NO: 9767 - DNA, 20 bp, Artificial Sequence
  Chr8_8 Reverse Primer
gctgtggccctaaaaggatt

SEQ ID NO: 9768 - DNA, 20 bp, Artificial Sequence
  Chr8_8 Reverse Primer
tggaggccaagatggaatag

SEQ ID NO: 9769 - DNA, 22 bp, Artificial Sequence
  Chr8_8 Reverse Primer
tctgtactcacaggctagtgcc

SEQ ID NO: 9770 - DNA, 20 bp, Artificial Sequence
  Chr8_8 Reverse Primer
ttggctttgcctgcatttat

SEQ ID NO: 9771 - DNA, 21 bp, Artificial Sequence
  Chr8_8 Reverse Primer
tgaaaacagcagtgtttaccg

SEQ ID NO: 9772 - DNA, 20 bp, Artificial Sequence
  Chr8_8 Reverse Primer
tccctcacgatcggtgttac

SEQ ID NO: 9773 - DNA, 20 bp, Artificial Sequence
  Chr8_8 Reverse Primer
tagggttcccccttagatgg

SEQ ID NO: 9774 - DNA, 20 bp, Artificial Sequence
  Chr8_8 Reverse Primer
ggcatttccatcattgtgaa

SEQ ID NO: 9775 - DNA, 20 bp, Artificial Sequence
  Chr8_8 Reverse Primer
ttttgcggatgtagcagaaa

SEQ ID NO: 9776 - DNA, 22 bp, Artificial Sequence
  Chr8_8 Reverse Primer
catcatttcccagtcactatgg

SEQ ID NO: 9777 - DNA, 27 bp, Artificial Sequence
  Chr8_8 Reverse Primer
aggttatatgtatttttgctacctgtt

SEQ ID NO: 9778 - DNA, 23 bp, Artificial Sequence
  Chr8_8 Reverse Primer
tgttcttaaggctttggctatga

SEQ ID NO: 9779 - DNA, 20 bp, Artificial Sequence
  Chr8_8 Reverse Primer
tagcgcattaaatggtggtg

SEQ ID NO: 9780 - DNA, 24 bp, Artificial Sequence
  Chr8_8 Reverse Primer
ccacagaagagtgatctatttcca

SEQ ID NO: 9781 - DNA, 20 bp, Artificial Sequence
  Chr8_8 Reverse Primer
tttttcaactgggcacactg

SEQ ID NO: 9782 - DNA, 22 bp, Artificial Sequence
  Chr8_8 Reverse Primer
tgggccctaaacttttaagaaa

SEQ ID NO: 9783 - DNA, 24 bp, Artificial Sequence
  Chr8_8 Reverse Primer
tgtgaatgtgtaatgagaatcagg

SEQ ID NO: 9784 - DNA, 20 bp, Artificial Sequence
  Chr8_8 Reverse Primer
ttgctgtttcctcaagttgc

SEQ ID NO: 9785 - DNA, 20 bp, Artificial Sequence
  Chr8_8 Reverse Primer
ttccaagcaccttttccaag

SEQ ID NO: 9786 - DNA, 20 bp, Artificial Sequence
  Chr8_8 Reverse Primer
tgaaaacttgcctttgcctt

SEQ ID NO: 9787 - DNA, 20 bp, Artificial Sequence
  Chr8_8 Reverse Primer
cttctggaagaagggcagtg

SEQ ID NO: 9788 - DNA, 21 bp, Artificial Sequence
  Chr8_8 Reverse Primer
aacagaagacgtttggttgga

SEQ ID NO: 9789 - DNA, 23 bp, Artificial Sequence
  Chr8_8 Reverse Primer
tttcacataattaagccaggaga

SEQ ID NO: 9790 - DNA, 22 bp, Artificial Sequence
  Chr8_8 Reverse Primer
aaatgtgttgtcgtgaaaatgc

SEQ ID NO: 9791 - DNA, 22 bp, Artificial Sequence
  Chr8_8 Reverse Primer
gaggaaatcaacagcaatcaga

SEQ ID NO: 9792 - DNA, 24 bp, Artificial Sequence
  Chr8_8 Reverse Primer
ttttcacaactctgtcaatatgct

SEQ ID NO: 9793 - DNA, 20 bp, Artificial Sequence
  Chr8_8 Reverse Primer
aagcaagtttgccttctgga

SEQ ID NO: 9794 - DNA, 20 bp, Artificial Sequence
  Chr8_8 Reverse Primer
acaaaactagcttgcctgcc

SEQ ID NO: 9795 - DNA, 20 bp, Artificial Sequence
  Chr8_8 Reverse Primer
cgacgcattgcaaaaagtaa

SEQ ID NO: 9796 - DNA, 21 bp, Artificial Sequence
  Chr8_8 Reverse Primer
tccactgctgtgtgagtttca

SEQ ID NO: 9797 - DNA, 20 bp, Artificial Sequence
  Chr8_8 Reverse Primer
gcttgcatgagtcttttccc

SEQ ID NO: 9798 - DNA, 20 bp, Artificial Sequence
  Chr8_8 Reverse Primer
aaggcttgagtggaccttga

SEQ ID NO: 9799 - DNA, 21 bp, Artificial Sequence
  Chr8_8 Reverse Primer
gaattgctgcacaaatctcaa

SEQ ID NO: 9800 - DNA, 20 bp, Artificial Sequence
  Chr8_8 Reverse Primer
aaacattatggcatggggaa

SEQ ID NO: 9801 - DNA, 20 bp, Artificial Sequence
  Chr8_8 Reverse Primer
tccgactttaagccttcctg

SEQ ID NO: 9802 - DNA, 21 bp, Artificial Sequence
  Chr8_8 Reverse Primer
ttgttcacagaagatttgcca

SEQ ID NO: 9803 - DNA, 22 bp, Artificial Sequence
  Chr8_8 Reverse Primer
cgatgccttctttgaatatttg

SEQ ID NO: 9804 - DNA, 20 bp, Artificial Sequence
  Chr8_8 Reverse Primer
tttcacatctatcaagcgcc

SEQ ID NO: 9805 - DNA, 20 bp, Artificial Sequence
  Chr8_8 Reverse Primer
ctagcccatgattccttgct

SEQ ID NO: 9806 - DNA, 26 bp, Artificial Sequence
  Chr8_8 Reverse Primer
tcagattgaattaccacaacattaca

SEQ ID NO: 9807 - DNA, 27 bp, Artificial Sequence
  Chr8_8 Reverse Primer
tcccactgttttgattttatatagttc

SEQ ID NO: 9808 - DNA, 25 bp, Artificial Sequence
  Chr8_8 Reverse Primer
tggtgaagatttagaaataagaggc

SEQ ID NO: 9809 - DNA, 22 bp, Artificial Sequence
  Chr8_9 Forward Primer
gcagtatgcttttctccacctc

SEQ ID NO: 9810 - DNA, 20 bp, Artificial Sequence
  Chr8_9 Forward Primer
taggcaagtcacaccaccac

SEQ ID NO: 9811 - DNA, 20 bp, Artificial Sequence
  Chr8_9 Forward Primer
ctgaatctgccccaggtaag

SEQ ID NO: 9812 - DNA, 20 bp, Artificial Sequence
  Chr8_9 Forward Primer
ctaaagcctctccctcatgc

SEQ ID NO: 9813 - DNA, 20 bp, Artificial Sequence
  Chr8_9 Forward Primer
aaatcaccctctctggacga

SEQ ID NO: 9814 - DNA, 20 bp, Artificial Sequence
  Chr8_9 Forward Primer
aaactgggttcatgccagag

SEQ ID NO: 9815 - DNA, 20 bp, Artificial Sequence
  Chr8_9 Forward Primer
tttcactcagcaaccctcct

SEQ ID NO: 9816 - DNA, 24 bp, Artificial Sequence
  Chr8_9 Forward Primer
aaaattctagctttgagggaaaaa

SEQ ID NO: 9817 - DNA, 20 bp, Artificial Sequence
  Chr8_9 Forward Primer
ctgtgtgaccttgagccaga

SEQ ID NO: 9818 - DNA, 20 bp, Artificial Sequence
  Chr8_9 Forward Primer
gggtttggacagaggacaga

SEQ ID NO: 9819 - DNA, 20 bp, Artificial Sequence
  Chr8_9 Forward Primer
cctcccagtcactcctaacg

SEQ ID NO: 9820 - DNA, 20 bp, Artificial Sequence
  Chr8_9 Forward Primer
ggacaacagcagggtggtat

SEQ ID NO: 9821 - DNA, 20 bp, Artificial Sequence
  Chr8_9 Forward Primer
tatggccctctggaaaatga

SEQ ID NO: 9822 - DNA, 20 bp, Artificial Sequence
  Chr8_9 Forward Primer
tgcatggctttggtttacag

SEQ ID NO: 9823 - DNA, 20 bp, Artificial Sequence
  Chr8_9 Forward Primer
gcaaacagagggatgaggaa

SEQ ID NO: 9824 - DNA, 20 bp, Artificial Sequence
  Chr8_9 Forward Primer
tcacagccaacatggagaac

SEQ ID NO: 9825 - DNA, 20 bp, Artificial Sequence
  Chr8_9 Forward Primer
aggcgaggttcgtaatttca

SEQ ID NO: 9826 - DNA, 23 bp, Artificial Sequence
  Chr8_9 Forward Primer
tgctcttgagtccttagaagaca

SEQ ID NO: 9827 - DNA, 20 bp, Artificial Sequence
  Chr8_9 Forward Primer
gagtgccacaggaaaccagt

SEQ ID NO: 9828 - DNA, 20 bp, Artificial Sequence
  Chr8_9 Forward Primer
gcagtctagtctcatggccc

SEQ ID NO: 9829 - DNA, 20 bp, Artificial Sequence
  Chr8_9 Forward Primer
tctgtacctggccttcatcc

SEQ ID NO: 9830 - DNA, 20 bp, Artificial Sequence
  Chr8_9 Forward Primer
ttctgaaagacatttggccc

SEQ ID NO: 9831 - DNA, 20 bp, Artificial Sequence
  Chr8_9 Forward Primer
agtccctgaacctgcactgt

SEQ ID NO: 9832 - DNA, 20 bp, Artificial Sequence
  Chr8_9 Forward Primer
ccttcccttctttcctgaca

SEQ ID NO: 9833 - DNA, 20 bp, Artificial Sequence
  Chr8_9 Forward Primer
ctgaggcaagaaccatgtca

SEQ ID NO: 9834 - DNA, 20 bp, Artificial Sequence
  Chr8_9 Forward Primer
acatggatcaaaccaaaccg

SEQ ID NO: 9835 - DNA, 20 bp, Artificial Sequence
  Chr8_9 Forward Primer
aggaaatgtggagctgtgga

SEQ ID NO: 9836 - DNA, 21 bp, Artificial Sequence
  Chr8_9 Forward Primer
ggttaagaatggtggtagcga

SEQ ID NO: 9837 - DNA, 22 bp, Artificial Sequence
  Chr8_9 Forward Primer
tggacttctaacctcaacacca

SEQ ID NO: 9838 - DNA, 20 bp, Artificial Sequence
  Chr8_9 Forward Primer
ttgcatttggatgaaattgg

SEQ ID NO: 9839 - DNA, 20 bp, Artificial Sequence
  Chr8_9 Forward Primer
agcccctttggattcaactt

SEQ ID NO: 9840 - DNA, 21 bp, Artificial Sequence
  Chr8_9 Forward Primer
cccttaggctcatcctacatc

SEQ ID NO: 9841 - DNA, 20 bp, Artificial Sequence
  Chr8_9 Forward Primer
cacacggaatgcctcttaca

SEQ ID NO: 9842 - DNA, 23 bp, Artificial Sequence
  Chr8_9 Forward Primer
tggcccatcaaatatagaaattg

SEQ ID NO: 9843 - DNA, 20 bp, Artificial Sequence
  Chr8_9 Forward Primer
cgtttgaggactgaaaggca

SEQ ID NO: 9844 - DNA, 20 bp, Artificial Sequence
  Chr8_9 Forward Primer
atgagatatgcccgctatgg

SEQ ID NO: 9845 - DNA, 21 bp, Artificial Sequence
  Chr8_9 Forward Primer
ttgtcactcagttcccattca

SEQ ID NO: 9846 - DNA, 20 bp, Artificial Sequence
  Chr8_9 Forward Primer
aaacctgcatttccagttcg

SEQ ID NO: 9847 - DNA, 20 bp, Artificial Sequence
  Chr8_9 Forward Primer
aagaccctccaaaagtggct

SEQ ID NO: 9848 - DNA, 20 bp, Artificial Sequence
  Chr8_9 Forward Primer
gggcagagagagggattttc

SEQ ID NO: 9849 - DNA, 20 bp, Artificial Sequence
  Chr8_9 Forward Primer
aattcccaactgctgaatgc

SEQ ID NO: 9850 - DNA, 20 bp, Artificial Sequence
  Chr8_9 Forward Primer
tgatcacccttcattcctca

SEQ ID NO: 9851 - DNA, 23 bp, Artificial Sequence
  Chr8_9 Forward Primer
gcttactccataaggttcacagg

SEQ ID NO: 9852 - DNA, 20 bp, Artificial Sequence
  Chr8_9 Forward Primer
attcaaactccaggggatga

SEQ ID NO: 9853 - DNA, 20 bp, Artificial Sequence
  Chr8_9 Forward Primer
gggatgacagatgacactgc

SEQ ID NO: 9854 - DNA, 20 bp, Artificial Sequence
  Chr8_9 Forward Primer
tcctgtgctgtcaattcctg

SEQ ID NO: 9855 - DNA, 20 bp, Artificial Sequence
  Chr8_9 Forward Primer
atggcagccaacacacagta

SEQ ID NO: 9856 - DNA, 20 bp, Artificial Sequence
  Chr8_9 Forward Primer
aggcaggagctctggaacta

SEQ ID NO: 9857 - DNA, 20 bp, Artificial Sequence
  Chr8_9 Forward Primer
tcacaaaagtgatcagggga

SEQ ID NO: 9858 - DNA, 23 bp, Artificial Sequence
  Chr8_9 Forward Primer
tgagcatttatattgaagcacca

SEQ ID NO: 9859 - DNA, 20 bp, Artificial Sequence
  Chr8_9 Forward Primer
tctcaatcattccccacctc

SEQ ID NO: 9860 - DNA, 20 bp, Artificial Sequence
  Chr8_9 Forward Primer
atgacgctgtttgtggattg

SEQ ID NO: 9861 - DNA, 20 bp, Artificial Sequence
  Chr8_9 Forward Primer
gtatggaagcatgggcaagt

SEQ ID NO: 9862 - DNA, 20 bp, Artificial Sequence
  Chr8_9 Forward Primer
acctcaaaggactgtggtgg

SEQ ID NO: 9863 - DNA, 20 bp, Artificial Sequence
  Chr8_9 Forward Primer
aaccgcaatgtgttgatgtg

SEQ ID NO: 9864 - DNA, 20 bp, Artificial Sequence
  Chr8_9 Forward Primer
ctcgggaacagctgagaaag

SEQ ID NO: 9865 - DNA, 20 bp, Artificial Sequence
  Chr8_9 Forward Primer
gttcctcccatgctccctat

SEQ ID NO: 9866 - DNA, 20 bp, Artificial Sequence
  Chr8_9 Forward Primer
ccttagggcataaaacaccg

SEQ ID NO: 9867 - DNA, 20 bp, Artificial Sequence
  Chr8_9 Forward Primer
ttcaccccaacgtaaacaca

SEQ ID NO: 9868 - DNA, 20 bp, Artificial Sequence
  Chr8_9 Forward Primer
ctcaggaggcagggagtctt

SEQ ID NO: 9869 - DNA, 20 bp, Artificial Sequence
  Chr8_9 Forward Primer
aattagggacctgccaggag

SEQ ID NO: 9870 - DNA, 20 bp, Artificial Sequence
  Chr8_9 Forward Primer
caggagcccattgtccttta

SEQ ID NO: 9871 - DNA, 20 bp, Artificial Sequence
  Chr8_9 Forward Primer
gcagtgcttctcaaaccctc

SEQ ID NO: 9872 - DNA, 20 bp, Artificial Sequence
  Chr8_9 Forward Primer
aaaaacgcagaacaaatgcc

SEQ ID NO: 9873 - DNA, 20 bp, Artificial Sequence
  Chr8_9 Forward Primer
agggattctaaaccaacggg

SEQ ID NO: 9874 - DNA, 20 bp, Artificial Sequence
  Chr8_9 Forward Primer
acttggcctcttgcttcaga

SEQ ID NO: 9875 - DNA, 20 bp, Artificial Sequence
  Chr8_9 Forward Primer
gctttcattcttgtggggag

SEQ ID NO: 9876 - DNA, 20 bp, Artificial Sequence
  Chr8_9 Forward Primer
caggcaggagccaatctcta

SEQ ID NO: 9877 - DNA, 20 bp, Artificial Sequence
  Chr8_9 Forward Primer
tacagccattcttcggtgtg

SEQ ID NO: 9878 - DNA, 23 bp, Artificial Sequence
  Chr8_9 Forward Primer
ttggtgtgtcctactgctattga

SEQ ID NO: 9879 - DNA, 20 bp, Artificial Sequence
  Chr8_9 Forward Primer
cagcaaggcctactctttgg

SEQ ID NO: 9880 - DNA, 20 bp, Artificial Sequence
  Chr8_9 Forward Primer
gagaactgtggggagtccaa

SEQ ID NO: 9881 - DNA, 20 bp, Artificial Sequence
  Chr8_9 Forward Primer
tgcaggaaacttacgacgtg

SEQ ID NO: 9882 - DNA, 20 bp, Artificial Sequence
  Chr8_9 Forward Primer
gactctgctggcaactcaca

SEQ ID NO: 9883 - DNA, 21 bp, Artificial Sequence
  Chr8_9 Forward Primer
tgctagctattagtggtgggc

SEQ ID NO: 9884 - DNA, 20 bp, Artificial Sequence
  Chr8_9 Forward Primer
agctctgcagcctcacacta

SEQ ID NO: 9885 - DNA, 20 bp, Artificial Sequence
  Chr8_9 Forward Primer
gcatcagagaaaactgcgtg

SEQ ID NO: 9886 - DNA, 22 bp, Artificial Sequence
  Chr8_9 Forward Primer
ttccttatctgaaaaatgggga

SEQ ID NO: 9887 - DNA, 20 bp, Artificial Sequence
  Chr8_9 Forward Primer
tgaaacaaattctttggggg

SEQ ID NO: 9888 - DNA, 20 bp, Artificial Sequence
  Chr8_9 Forward Primer
gggacagctgagtccaacag

SEQ ID NO: 9889 - DNA, 20 bp, Artificial Sequence
  Chr8_9 Forward Primer
aatactgcccattcaggtgc

SEQ ID NO: 9890 - DNA, 20 bp, Artificial Sequence
  Chr8_9 Forward Primer
cagcattgggcagattatca

SEQ ID NO: 9891 - DNA, 20 bp, Artificial Sequence
  Chr8_9 Forward Primer
ataggggagcagaaagccag

SEQ ID NO: 9892 - DNA, 20 bp, Artificial Sequence
  Chr8_9 Forward Primer
tgcttttccagacccttcat

SEQ ID NO: 9893 - DNA, 21 bp, Artificial Sequence
  Chr8_9 Forward Primer
caaatgggaaaaactaagcca

SEQ ID NO: 9894 - DNA, 23 bp, Artificial Sequence
  Chr8_9 Forward Primer
tcaagcattgacaaaaagagaaa

SEQ ID NO: 9895 - DNA, 22 bp, Artificial Sequence
  Chr8_9 Forward Primer
gacgaggaaacagagacagaaa

SEQ ID NO: 9896 - DNA, 22 bp, Artificial Sequence
  Chr8_9 Forward Primer
aaatggcaaacactgacagaaa

SEQ ID NO: 9897 - DNA, 20 bp, Artificial Sequence
  Chr8_9 Forward Primer
agctctcagagattggcctg

SEQ ID NO: 9898 - DNA, 20 bp, Artificial Sequence
  Chr8_9 Forward Primer
gcctcctctgacaggcacta

SEQ ID NO: 9899 - DNA, 20 bp, Artificial Sequence
  Chr8_9 Forward Primer
gtttgtcccaggaaaagcag

SEQ ID NO: 9900 - DNA, 20 bp, Artificial Sequence
  Chr8_9 Forward Primer
gccagactccaactggaaca

SEQ ID NO: 9901 - DNA, 23 bp, Artificial Sequence
  Chr8_9 Forward Primer
ttctcatttgtaaaataggctcg

SEQ ID NO: 9902 - DNA, 20 bp, Artificial Sequence
  Chr8_9 Forward Primer
tgaagatggccaaggattgt

SEQ ID NO: 9903 - DNA, 20 bp, Artificial Sequence
  Chr8_9 Forward Primer
ccaataggctgggttgaaag

SEQ ID NO: 9904 - DNA, 20 bp, Artificial Sequence
  Chr8_9 Forward Primer
ggcctctggtttccctacct

SEQ ID NO: 9905 - DNA, 20 bp, Artificial Sequence
  Chr8_9 Reverse Primer
aggcgtgttttgtgctttct

SEQ ID NO: 9906 - DNA, 20 bp, Artificial Sequence
  Chr8_9 Reverse Primer
atggtgccaagaaggctgta

SEQ ID NO: 9907 - DNA, 23 bp, Artificial Sequence
  Chr8_9 Reverse Primer
tgttcgtaaagtctggaaacatc

SEQ ID NO: 9908 - DNA, 20 bp, Artificial Sequence
  Chr8_9 Reverse Primer
atggtgtaaggtgggctcag

SEQ ID NO: 9909 - DNA, 20 bp, Artificial Sequence
  Chr8_9 Reverse Primer
tatacctccccctgaagcct

SEQ ID NO: 9910 - DNA, 20 bp, Artificial Sequence
  Chr8_9 Reverse Primer
ttaggacgatgtccctcctg

SEQ ID NO: 9911 - DNA, 20 bp, Artificial Sequence
  Chr8_9 Reverse Primer
gtttctgggcctctttttcc

SEQ ID NO: 9912 - DNA, 20 bp, Artificial Sequence
  Chr8_9 Reverse Primer
gtcctgcctgtgtgaaaatg

SEQ ID NO: 9913 - DNA, 20 bp, Artificial Sequence
  Chr8_9 Reverse Primer
gtggattggcatcgaagact

SEQ ID NO: 9914 - DNA, 20 bp, Artificial Sequence
  Chr8_9 Reverse Primer
cctgtactcaggatcgggaa

SEQ ID NO: 9915 - DNA, 20 bp, Artificial Sequence
  Chr8_9 Reverse Primer
ttaattaagggggcatgcag

SEQ ID NO: 9916 - DNA, 23 bp, Artificial Sequence
  Chr8_9 Reverse Primer
cagagctgttttaaggaaatcca

SEQ ID NO: 9917 - DNA, 20 bp, Artificial Sequence
  Chr8_9 Reverse Primer
ggccactaccaaaattgagc

SEQ ID NO: 9918 - DNA, 20 bp, Artificial Sequence
  Chr8_9 Reverse Primer
cccttaggcctgtgttctca

SEQ ID NO: 9919 - DNA, 20 bp, Artificial Sequence
  Chr8_9 Reverse Primer
ttttggttaaagtgccctgg

SEQ ID NO: 9920 - DNA, 20 bp, Artificial Sequence
  Chr8_9 Reverse Primer
ctgcacctgcctcctcttac

SEQ ID NO: 9921 - DNA, 20 bp, Artificial Sequence
  Chr8_9 Reverse Primer
ctacccatgggagtgaggtg

SEQ ID NO: 9922 - DNA, 22 bp, Artificial Sequence
  Chr8_9 Reverse Primer
ttgatggatgtgtacaatttgc

SEQ ID NO: 9923 - DNA, 20 bp, Artificial Sequence
  Chr8_9 Reverse Primer
gccagtccaaaccaagacat

SEQ ID NO: 9924 - DNA, 20 bp, Artificial Sequence
  Chr8_9 Reverse Primer
tgtggttcacctctctgctg

SEQ ID NO: 9925 - DNA, 20 bp, Artificial Sequence
  Chr8_9 Reverse Primer
ctgcctcagtgtatcccagg

SEQ ID NO: 9926 - DNA, 20 bp, Artificial Sequence
  Chr8_9 Reverse Primer
gtccctgtttcaatggtggt

SEQ ID NO: 9927 - DNA, 20 bp, Artificial Sequence
  Chr8_9 Reverse Primer
caggaagccaccaatctttc

SEQ ID NO: 9928 - DNA, 20 bp, Artificial Sequence
  Chr8_9 Reverse Primer
agaggtatgcatggcatgtt

SEQ ID NO: 9929 - DNA, 24 bp, Artificial Sequence
  Chr8_9 Reverse Primer
cagggaagaattttctacctcaaa

SEQ ID NO: 9930 - DNA, 21 bp, Artificial Sequence
  Chr8_9 Reverse Primer
agcttttgcttctccacagtt

SEQ ID NO: 9931 - DNA, 20 bp, Artificial Sequence
  Chr8_9 Reverse Primer
tggcatgtcacatcctgaat

SEQ ID NO: 9932 - DNA, 21 bp, Artificial Sequence
  Chr8_9 Reverse Primer
gaatgctcagtatgtccgagg

SEQ ID NO: 9933 - DNA, 20 bp, Artificial Sequence
  Chr8_9 Reverse Primer
taggcgcacagagcaaaata

SEQ ID NO: 9934 - DNA, 22 bp, Artificial Sequence
  Chr8_9 Reverse Primer
cacatggtgcattgtagtagcc

SEQ ID NO: 9935 - DNA, 20 bp, Artificial Sequence
  Chr8_9 Reverse Primer
gttgtggctggtggaaaaac

SEQ ID NO: 9936 - DNA, 21 bp, Artificial Sequence
  Chr8_9 Reverse Primer
cacgtacctgtgtgtgcatgt

SEQ ID NO: 9937 - DNA, 20 bp, Artificial Sequence
  Chr8_9 Reverse Primer
agattgggggaaaatctgct

SEQ ID NO: 9938 - DNA, 20 bp, Artificial Sequence
  Chr8_9 Reverse Primer
gggtgggtggagataacaca

SEQ ID NO: 9939 - DNA, 20 bp, Artificial Sequence
  Chr8_9 Reverse Primer
gtttggacctttgagccaat

SEQ ID NO: 9940 - DNA, 20 bp, Artificial Sequence
  Chr8_9 Reverse Primer
caagaagcgcatggaatttt

SEQ ID NO: 9941 - DNA, 20 bp, Artificial Sequence
  Chr8_9 Reverse Primer
ttgaggttgtgatctgcctg

SEQ ID NO: 9942 - DNA, 20 bp, Artificial Sequence
  Chr8_9 Reverse Primer
tctggcttgggaattgaatc

SEQ ID NO: 9943 - DNA, 20 bp, Artificial Sequence
  Chr8_9 Reverse Primer
gtaggagggtaccaggaggc

SEQ ID NO: 9944 - DNA, 20 bp, Artificial Sequence
  Chr8_9 Reverse Primer
ttctaaggagggctgtgagc

SEQ ID NO: 9945 - DNA, 20 bp, Artificial Sequence
  Chr8_9 Reverse Primer
tcctttcaccccaaaccata

SEQ ID NO: 9946 - DNA, 20 bp, Artificial Sequence
  Chr8_9 Reverse Primer
ttccctctcccatttcacag

SEQ ID NO: 9947 - DNA, 20 bp, Artificial Sequence
  Chr8_9 Reverse Primer
gttgatctctcatttgcccc

SEQ ID NO: 9948 - DNA, 20 bp, Artificial Sequence
  Chr8_9 Reverse Primer
ttgcatcaaatcgtccatgt

SEQ ID NO: 9949 - DNA, 20 bp, Artificial Sequence
  Chr8_9 Reverse Primer
agtagagcacagtggggagg

SEQ ID NO: 9950 - DNA, 20 bp, Artificial Sequence
  Chr8_9 Reverse Primer
ctgctgccactgatttttga

SEQ ID NO: 9951 - DNA, 20 bp, Artificial Sequence
  Chr8_9 Reverse Primer
acacgcaagcagttcatgtg

SEQ ID NO: 9952 - DNA, 23 bp, Artificial Sequence
  Chr8_9 Reverse Primer
agtggcttatctgtgtcactttt

SEQ ID NO: 9953 - DNA, 20 bp, Artificial Sequence
  Chr8_9 Reverse Primer
accatagttgcaaagtgccc

SEQ ID NO: 9954 - DNA, 23 bp, Artificial Sequence
  Chr8_9 Reverse Primer
tttgtggctgtgttaggttatca

SEQ ID NO: 9955 - DNA, 20 bp, Artificial Sequence
  Chr8_9 Reverse Primer
gagagaggccttgcactttg

SEQ ID NO: 9956 - DNA, 20 bp, Artificial Sequence
  Chr8_9 Reverse Primer
agaggtgccaggtctttcaa

SEQ ID NO: 9957 - DNA, 20 bp, Artificial Sequence
  Chr8_9 Reverse Primer
ctggcatttaacccacgtct

SEQ ID NO: 9958 - DNA, 21 bp, Artificial Sequence
  Chr8_9 Reverse Primer
tgaaaggaaatgcatctttgg

SEQ ID NO: 9959 - DNA, 20 bp, Artificial Sequence
  Chr8_9 Reverse Primer
ccaaagctcaggggtatgtt

SEQ ID NO: 9960 - DNA, 20 bp, Artificial Sequence
  Chr8_9 Reverse Primer
agaggaccgctttttgaaca

SEQ ID NO: 9961 - DNA, 20 bp, Artificial Sequence
  Chr8_9 Reverse Primer
cctgattgtcctgcacctct

SEQ ID NO: 9962 - DNA, 20 bp, Artificial Sequence
  Chr8_9 Reverse Primer
cagggtcttgtcacctccat

SEQ ID NO: 9963 - DNA, 20 bp, Artificial Sequence
  Chr8_9 Reverse Primer
acagagttccagctcgagga

SEQ ID NO: 9964 - DNA, 19 bp, Artificial Sequence
  Chr8_9 Reverse Primer
agtagcctcagtcccagcc

SEQ ID NO: 9965 - DNA, 18 bp, Artificial Sequence
  Chr8_9 Reverse Primer
ccaggatcatgcgcactc

SEQ ID NO: 9966 - DNA, 20 bp, Artificial Sequence
  Chr8_9 Reverse Primer
tgtacttgttctgggatgcg

SEQ ID NO: 9967 - DNA, 20 bp, Artificial Sequence
  Chr8_9 Reverse Primer
cagacaggccaactgtttca

SEQ ID NO: 9968 - DNA, 22 bp, Artificial Sequence
  Chr8_9 Reverse Primer
tggtttgtctccttgtaagtgc

SEQ ID NO: 9969 - DNA, 22 bp, Artificial Sequence
  Chr8_9 Reverse Primer
tgtcttccttaccctctcctga

SEQ ID NO: 9970 - DNA, 20 bp, Artificial Sequence
  Chr8_9 Reverse Primer
tccaacacggagatccctac

SEQ ID NO: 9971 - DNA, 20 bp, Artificial Sequence
  Chr8_9 Reverse Primer
tgagcctgggtaaaatgagg

SEQ ID NO: 9972 - DNA, 21 bp, Artificial Sequence
  Chr8_9 Reverse Primer
cccatagcatctaccacaagc

SEQ ID NO: 9973 - DNA, 20 bp, Artificial Sequence
  Chr8_9 Reverse Primer
gtcgggcacctaagaaaaca

SEQ ID NO: 9974 - DNA, 22 bp, Artificial Sequence
  Chr8_9 Reverse Primer
cagagaaaaagatgtagctgcg

SEQ ID NO: 9975 - DNA, 20 bp, Artificial Sequence
  Chr8_9 Reverse Primer
ttgagcctaagctttccagc

SEQ ID NO: 9976 - DNA, 20 bp, Artificial Sequence
  Chr8_9 Reverse Primer
caatcccatctacaccaggg

SEQ ID NO: 9977 - DNA, 20 bp, Artificial Sequence
  Chr8_9 Reverse Primer
caacatccctacccatcacc

SEQ ID NO: 9978 - DNA, 20 bp, Artificial Sequence
  Chr8_9 Reverse Primer
gttgggagggaggaaaaagt

SEQ ID NO: 9979 - DNA, 21 bp, Artificial Sequence
  Chr8_9 Reverse Primer
tctcccttgaaagccttttct

SEQ ID NO: 9980 - DNA, 21 bp, Artificial Sequence
  Chr8_9 Reverse Primer
ggtcaggatgacaaaggacaa

SEQ ID NO: 9981 - DNA, 20 bp, Artificial Sequence
  Chr8_9 Reverse Primer
cgggactggaggaagatgta

SEQ ID NO: 9982 - DNA, 20 bp, Artificial Sequence
  Chr8_9 Reverse Primer
gcattgaccatcaaccctct

SEQ ID NO: 9983 - DNA, 20 bp, Artificial Sequence
  Chr8_9 Reverse Primer
cacgtgcacttcagtggaat

SEQ ID NO: 9984 - DNA, 21 bp, Artificial Sequence
  Chr8_9 Reverse Primer
tgcctataattgggctcaaaa

SEQ ID NO: 9985 - DNA, 20 bp, Artificial Sequence
  Chr8_9 Reverse Primer
ctttgggagcttgctgtttc

SEQ ID NO: 9986 - DNA, 20 bp, Artificial Sequence
  Chr8_9 Reverse Primer
cttgtcagtgggaggtggat

SEQ ID NO: 9987 - DNA, 20 bp, Artificial Sequence
  Chr8_9 Reverse Primer
gatctctgcctctccctgtg

SEQ ID NO: 9988 - DNA, 20 bp, Artificial Sequence
  Chr8_9 Reverse Primer
ggaaccagagacaaaagcca

SEQ ID NO: 9989 - DNA, 20 bp, Artificial Sequence
  Chr8_9 Reverse Primer
acctcaatggccacttcact

SEQ ID NO: 9990 - DNA, 20 bp, Artificial Sequence
  Chr8_9 Reverse Primer
ggctgttatccgccatagtc

SEQ ID NO: 9991 - DNA, 21 bp, Artificial Sequence
  Chr8_9 Reverse Primer
tgtttgaggggaatttaaagc

SEQ ID NO: 9992 - DNA, 20 bp, Artificial Sequence
  Chr8_9 Reverse Primer
cggaacagatgcacatcaac

SEQ ID NO: 9993 - DNA, 20 bp, Artificial Sequence
  Chr8_9 Reverse Primer
tccttcaattctcctgtggc

SEQ ID NO: 9994 - DNA, 21 bp, Artificial Sequence
  Chr8_9 Reverse Primer
gcggtactgatttgagcattt

SEQ ID NO: 9995 - DNA, 20 bp, Artificial Sequence
  Chr8_9 Reverse Primer
aaagcccaaagaaaatctcg

SEQ ID NO: 9996 - DNA, 20 bp, Artificial Sequence
  Chr8_9 Reverse Primer
cttatactgttgcccgccat

SEQ ID NO: 9997 - DNA, 20 bp, Artificial Sequence
  Chr8_9 Reverse Primer
tgttgaaaatggtggaagga

SEQ ID NO: 9998 - DNA, 20 bp, Artificial Sequence
  Chr8_9 Reverse Primer
ggctccatgcattttatgct

SEQ ID NO: 9999 - DNA, 20 bp, Artificial Sequence
  Chr8_9 Reverse Primer
acaacacatctgtgggcaag

SEQ ID NO: 10000 - DNA, 20 bp, Artificial Sequence
  Chr8_9 Reverse Primer
ggcaggggatgaaatgatta

SEQ ID NO: 10001 - DNA, 27 bp, Artificial Sequence
  Chr8_10 Forward Primer
tttttctataatcaaagcaataaacca

SEQ ID NO: 10002 - DNA, 20 bp, Artificial Sequence
  Chr8_10 Forward Primer
ggctggaagtcacttgctct

SEQ ID NO: 10003 - DNA, 20 bp, Artificial Sequence
  Chr8_10 Forward Primer
cctgaggtgatgggagacat

SEQ ID NO: 10004 - DNA, 21 bp, Artificial Sequence
  Chr8_10 Forward Primer
tgtttgggccttaagaagtga

SEQ ID NO: 10005 - DNA, 20 bp, Artificial Sequence
  Chr8_10 Forward Primer
tggaaagtagggaagctgga

SEQ ID NO: 10006 - DNA, 20 bp, Artificial Sequence
  Chr8_10 Forward Primer
taggagtggacggacaaagc

SEQ ID NO: 10007 - DNA, 20 bp, Artificial Sequence
  Chr8_10 Forward Primer
ttctccaatttgggcttgtc

SEQ ID NO: 10008 - DNA, 20 bp, Artificial Sequence
  Chr8_10 Forward Primer
tgaagctcccatgctattcc

SEQ ID NO: 10009 - DNA, 20 bp, Artificial Sequence
  Chr8_10 Forward Primer
atggcaacaacacggaagat

SEQ ID NO: 10010 - DNA, 20 bp, Artificial Sequence
  Chr8_10 Forward Primer
aggcatggattctgatgagg

SEQ ID NO: 10011 - DNA, 20 bp, Artificial Sequence
  Chr8_10 Forward Primer
gcaggaactggaggtcagag

SEQ ID NO: 10012 - DNA, 23 bp, Artificial Sequence
  Chr8_10 Forward Primer
catggaactcaagtctttcaatg

SEQ ID NO: 10013 - DNA, 20 bp, Artificial Sequence
  Chr8_10 Forward Primer
atgtgccccataaccagtgt

SEQ ID NO: 10014 - DNA, 20 bp, Artificial Sequence
  Chr8_10 Forward Primer
tgttgcttttactgggggaa

SEQ ID NO: 10015 - DNA, 19 bp, Artificial Sequence
  Chr8_10 Forward Primer
tgccacagtcctgcttgat

SEQ ID NO: 10016 - DNA, 20 bp, Artificial Sequence
  Chr8_10 Forward Primer
gaaaaggtaaaggccccaag

SEQ ID NO: 10017 - DNA, 20 bp, Artificial Sequence
  Chr8_10 Forward Primer
gggtttccagaaacatctgc

SEQ ID NO: 10018 - DNA, 20 bp, Artificial Sequence
  Chr8_10 Forward Primer
acattttggagctcacgagt

SEQ ID NO: 10019 - DNA, 20 bp, Artificial Sequence
  Chr8_10 Forward Primer
attaaaattgggtggccctt

SEQ ID NO: 10020 - DNA, 21 bp, Artificial Sequence
  Chr8_10 Forward Primer
gggcttagtccctaaagtcct

SEQ ID NO: 10021 - DNA, 20 bp, Artificial Sequence
  Chr8_10 Forward Primer
ttgtctggggatttcaaaag

SEQ ID NO: 10022 - DNA, 20 bp, Artificial Sequence
  Chr8_10 Forward Primer
gaagtgaacaaaagctgccc

SEQ ID NO: 10023 - DNA, 20 bp, Artificial Sequence
  Chr8_10 Forward Primer
gaaaagcaatttgaggctgg

SEQ ID NO: 10024 - DNA, 22 bp, Artificial Sequence
  Chr8_10 Forward Primer
tgagacaaaatgagatgagctg

SEQ ID NO: 10025 - DNA, 21 bp, Artificial Sequence
  Chr8_10 Forward Primer
tgtgagtgtctgatttcccag

SEQ ID NO: 10026 - DNA, 20 bp, Artificial Sequence
  Chr8_10 Forward Primer
ctgtcaaccgaacttgcaga

SEQ ID NO: 10027 - DNA, 20 bp, Artificial Sequence
  Chr8_10 Forward Primer
ctccagttaagttggggcag

SEQ ID NO: 10028 - DNA, 20 bp, Artificial Sequence
  Chr8_10 Forward Primer
atctggtttctgcacccaac

SEQ ID NO: 10029 - DNA, 20 bp, Artificial Sequence
  Chr8_10 Forward Primer
ttttggacccccagattttt

SEQ ID NO: 10030 - DNA, 23 bp, Artificial Sequence
  Chr8_10 Forward Primer
gctcttaagtctttggtccttgg

SEQ ID NO: 10031 - DNA, 20 bp, Artificial Sequence
  Chr8_10 Forward Primer
ttacatcccctaatgcctgc

SEQ ID NO: 10032 - DNA, 22 bp, Artificial Sequence
  Chr8_10 Forward Primer
tcaaattgaataatggtgggaa

SEQ ID NO: 10033 - DNA, 20 bp, Artificial Sequence
  Chr8_10 Forward Primer
gaatttcagctttgcttgcc

SEQ ID NO: 10034 - DNA, 24 bp, Artificial Sequence
  Chr8_10 Forward Primer
tcttccctatgtgctatttcttga

SEQ ID NO: 10035 - DNA, 21 bp, Artificial Sequence
  Chr8_10 Forward Primer
gcaagtgaaaacaagcacaaa

SEQ ID NO: 10036 - DNA, 24 bp, Artificial Sequence
  Chr8_10 Forward Primer
tgcttctaaggaaacaatcagaaa

SEQ ID NO: 10037 - DNA, 26 bp, Artificial Sequence
  Chr8_10 Forward Primer
gtaatgcctcaactacgtaaagaaag

SEQ ID NO: 10038 - DNA, 23 bp, Artificial Sequence
  Chr8_10 Forward Primer
tgcattttgctctattgatcctt

SEQ ID NO: 10039 - DNA, 22 bp, Artificial Sequence
  Chr8_10 Forward Primer
ccctagttttgaaattttcccc

SEQ ID NO: 10040 - DNA, 25 bp, Artificial Sequence
  Chr8_10 Forward Primer
ttgaaaagttacatgactgctgaaa

SEQ ID NO: 10041 - DNA, 24 bp, Artificial Sequence
  Chr8_10 Forward Primer
caaaatttggaggaatagctaaca

SEQ ID NO: 10042 - DNA, 22 bp, Artificial Sequence
  Chr8_10 Forward Primer
tgcttttaaagtcagaacgcag

SEQ ID NO: 10043 - DNA, 20 bp, Artificial Sequence
  Chr8_10 Forward Primer
agtgggggtggaggataact

SEQ ID NO: 10044 - DNA, 22 bp, Artificial Sequence
  Chr8_10 Forward Primer
ccacttaaaagaaacctgcatt

SEQ ID NO: 10045 - DNA, 24 bp, Artificial Sequence
  Chr8_10 Forward Primer
ggaaagtttaatccaaagaaagca

SEQ ID NO: 10046 - DNA, 20 bp, Artificial Sequence
  Chr8_10 Forward Primer
ttaggcctgaagctgaggaa

SEQ ID NO: 10047 - DNA, 20 bp, Artificial Sequence
  Chr8_10 Forward Primer
atgtggcttggtgggtagag

SEQ ID NO: 10048 - DNA, 20 bp, Artificial Sequence
  Chr8_10 Forward Primer
tcacatgccaaccctctaca

SEQ ID NO: 10049 - DNA, 20 bp, Artificial Sequence
  Chr8_10 Forward Primer
atccaatgtctgcagctcct

SEQ ID NO: 10050 - DNA, 20 bp, Artificial Sequence
  Chr8_10 Forward Primer
tacttttgtttttccccgca

SEQ ID NO: 10051 - DNA, 20 bp, Artificial Sequence
  Chr8_10 Forward Primer
gtagaaggtgggaaggggag

SEQ ID NO: 10052 - DNA, 20 bp, Artificial Sequence
  Chr8_10 Forward Primer
gcatgatccatgctctggtt

SEQ ID NO: 10053 - DNA, 20 bp, Artificial Sequence
  Chr8_10 Forward Primer
agcttctgaatttctttgcg

SEQ ID NO: 10054 - DNA, 20 bp, Artificial Sequence
  Chr8_10 Forward Primer
ctgcgtctcttcgttggatt

SEQ ID NO: 10055 - DNA, 21 bp, Artificial Sequence
  Chr8_10 Forward Primer
catggtattcttttccttggc

SEQ ID NO: 10056 - DNA, 22 bp, Artificial Sequence
  Chr8_10 Forward Primer
tgaacagtttcagagacaggga

SEQ ID NO: 10057 - DNA, 20 bp, Artificial Sequence
  Chr8_10 Forward Primer
gcacaatagatccctctggc

SEQ ID NO: 10058 - DNA, 20 bp, Artificial Sequence
  Chr8_10 Forward Primer
gagcttggcattgaaaggag

SEQ ID NO: 10059 - DNA, 20 bp, Artificial Sequence
  Chr8_10 Forward Primer
tgtctgggataatgttggca

SEQ ID NO: 10060 - DNA, 25 bp, Artificial Sequence
  Chr8_10 Forward Primer
gcattgaataaacttttgaatgaca

SEQ ID NO: 10061 - DNA, 21 bp, Artificial Sequence
  Chr8_10 Forward Primer
tcctgtgtgtcctgagagctt

SEQ ID NO: 10062 - DNA, 22 bp, Artificial Sequence
  Chr8_10 Forward Primer
ttctgtagctggaacaaactgg

SEQ ID NO: 10063 - DNA, 26 bp, Artificial Sequence
  Chr8_10 Forward Primer
tttttacctttggaaaatatcaagtt

SEQ ID NO: 10064 - DNA, 20 bp, Artificial Sequence
  Chr8_10 Forward Primer
tgctgattctcttggaaggc

SEQ ID NO: 10065 - DNA, 20 bp, Artificial Sequence
  Chr8_10 Forward Primer
ccctggacgtcatacctgat

SEQ ID NO: 10066 - DNA, 20 bp, Artificial Sequence
  Chr8_10 Forward Primer
gcaaacaataggctcaagca

SEQ ID NO: 10067 - DNA, 25 bp, Artificial Sequence
  Chr8_10 Forward Primer
ttgactacagtctttctgaaatccc

SEQ ID NO: 10068 - DNA, 20 bp, Artificial Sequence
  Chr8_10 Forward Primer
ccctgcagtcgctgtaattc

SEQ ID NO: 10069 - DNA, 20 bp, Artificial Sequence
  Chr8_10 Forward Primer
aagaatccctcccaatctcc

SEQ ID NO: 10070 - DNA, 21 bp, Artificial Sequence
  Chr8_10 Forward Primer
acaattgttccattgcagcat

SEQ ID NO: 10071 - DNA, 20 bp, Artificial Sequence
  Chr8_10 Forward Primer
atgcccagcttctcttgaaa

SEQ ID NO: 10072 - DNA, 20 bp, Artificial Sequence
  Chr8_10 Forward Primer
aatgcctcaaatttgccctt

SEQ ID NO: 10073 - DNA, 24 bp, Artificial Sequence
  Chr8_10 Forward Primer
aaagaaacttcaggtccttctttt

SEQ ID NO: 10074 - DNA, 20 bp, Artificial Sequence
  Chr8_10 Forward Primer
caacatggatggcaagctaa

SEQ ID NO: 10075 - DNA, 20 bp, Artificial Sequence
  Chr8_10 Forward Primer
catgcaacttttagctgcca

SEQ ID NO: 10076 - DNA, 20 bp, Artificial Sequence
  Chr8_10 Forward Primer
ggtctcagctttggcgatac

SEQ ID NO: 10077 - DNA, 20 bp, Artificial Sequence
  Chr8_10 Forward Primer
ggcaaggtttgcaacaaaat

SEQ ID NO: 10078 - DNA, 20 bp, Artificial Sequence
  Chr8_10 Forward Primer
caaactggaggcctattgga

SEQ ID NO: 10079 - DNA, 20 bp, Artificial Sequence
  Chr8_10 Forward Primer
cctgagtggtcagtctgggt

SEQ ID NO: 10080 - DNA, 22 bp, Artificial Sequence
  Chr8_10 Forward Primer
ttgggtttcttctagtcacctt

SEQ ID NO: 10081 - DNA, 20 bp, Artificial Sequence
  Chr8_10 Forward Primer
actctgagcctcccttcaca

SEQ ID NO: 10082 - DNA, 20 bp, Artificial Sequence
  Chr8_10 Forward Primer
cttactgctgtccgcttggt

SEQ ID NO: 10083 - DNA, 20 bp, Artificial Sequence
  Chr8_10 Forward Primer
ggctttacttgccactgctc

SEQ ID NO: 10084 - DNA, 20 bp, Artificial Sequence
  Chr8_10 Forward Primer
attgtcctcatggccacttc

SEQ ID NO: 10085 - DNA, 20 bp, Artificial Sequence
  Chr8_10 Forward Primer
tctttctgactcctgagccc

SEQ ID NO: 10086 - DNA, 20 bp, Artificial Sequence
  Chr8_10 Forward Primer
catgatctccttggcctctc

SEQ ID NO: 10087 - DNA, 20 bp, Artificial Sequence
  Chr8_10 Forward Primer
ccaaatggcaacaataggct

SEQ ID NO: 10088 - DNA, 20 bp, Artificial Sequence
  Chr8_10 Forward Primer
aaggatcatgcttctttgcc

SEQ ID NO: 10089 - DNA, 20 bp, Artificial Sequence
  Chr8_10 Forward Primer
atccccagtatttggcacag

SEQ ID NO: 10090 - DNA, 20 bp, Artificial Sequence
  Chr8_10 Forward Primer
tggttgtctgtggaccaaaa

SEQ ID NO: 10091 - DNA, 20 bp, Artificial Sequence
  Chr8_10 Forward Primer
aagacaacaatccagcccac

SEQ ID NO: 10092 - DNA, 20 bp, Artificial Sequence
  Chr8_10 Forward Primer
attggatcaacaaactggca

SEQ ID NO: 10093 - DNA, 20 bp, Artificial Sequence
  Chr8_10 Forward Primer
aggtttggatggacttgtgg

SEQ ID NO: 10094 - DNA, 20 bp, Artificial Sequence
  Chr8_10 Forward Primer
cagcttgagctgaggttgtg

SEQ ID NO: 10095 - DNA, 20 bp, Artificial Sequence
  Chr8_10 Forward Primer
aggaagccaacagcaatgat

SEQ ID NO: 10096 - DNA, 21 bp, Artificial Sequence
  Chr8_10 Forward Primer
tgtaggcccacaagaatagga

SEQ ID NO: 10097 - DNA, 25 bp, Artificial Sequence
  Chr8_10 Reverse Primer
gaagaaataccaacgagagtttcaa

SEQ ID NO: 10098 - DNA, 22 bp, Artificial Sequence
  Chr8_10 Reverse Primer
ccttctttaattctggtgtgcc

SEQ ID NO: 10099 - DNA, 20 bp, Artificial Sequence
  Chr8_10 Reverse Primer
cgtggatggcctgaatctat

SEQ ID NO: 10100 - DNA, 23 bp, Artificial Sequence
  Chr8_10 Reverse Primer
cactttcttcctctctctccaaa

SEQ ID NO: 10101 - DNA, 20 bp, Artificial Sequence
  Chr8_10 Reverse Primer
gaggcattttaattggtcgg

SEQ ID NO: 10102 - DNA, 20 bp, Artificial Sequence
  Chr8_10 Reverse Primer
ccagggagggacttcctaaa

SEQ ID NO: 10103 - DNA, 20 bp, Artificial Sequence
  Chr8_10 Reverse Primer
cagttgggaggaaagtgagc

SEQ ID NO: 10104 - DNA, 20 bp, Artificial Sequence
  Chr8_10 Reverse Primer
taaccccctgaaaagggact

SEQ ID NO: 10105 - DNA, 20 bp, Artificial Sequence
  Chr8_10 Reverse Primer
tctccacccactttgctctt

SEQ ID NO: 10106 - DNA, 20 bp, Artificial Sequence
  Chr8_10 Reverse Primer
tctcgccattacaagagcct

SEQ ID NO: 10107 - DNA, 23 bp, Artificial Sequence
  Chr8_10 Reverse Primer
tggtcctaaaagaacttgtgagc

SEQ ID NO: 10108 - DNA, 23 bp, Artificial Sequence
  Chr8_10 Reverse Primer
tgaagtgtggaatcagcagtaaa

SEQ ID NO: 10109 - DNA, 20 bp, Artificial Sequence
  Chr8_10 Reverse Primer
tgagccttgtggatgttctg

SEQ ID NO: 10110 - DNA, 20 bp, Artificial Sequence
  Chr8_10 Reverse Primer
caaggcattctccaccaact

SEQ ID NO: 10111 - DNA, 23 bp, Artificial Sequence
  Chr8_10 Reverse Primer
ggaaaagctgtctacttctctgc

SEQ ID NO: 10112 - DNA, 20 bp, Artificial Sequence
  Chr8_10 Reverse Primer
gggggctggaagacagtaac

SEQ ID NO: 10113 - DNA, 20 bp, Artificial Sequence
  Chr8_10 Reverse Primer
agtcatccatcaaagggcat

SEQ ID NO: 10114 - DNA, 20 bp, Artificial Sequence
  Chr8_10 Reverse Primer
tggctaactggtaggcaact

SEQ ID NO: 10115 - DNA, 20 bp, Artificial Sequence
  Chr8_10 Reverse Primer
ggttttcatttgggcttgtc

SEQ ID NO: 10116 - DNA, 20 bp, Artificial Sequence
  Chr8_10 Reverse Primer
tgttcctagactggtgggaa

SEQ ID NO: 10117 - DNA, 20 bp, Artificial Sequence
  Chr8_10 Reverse Primer
ccatggcctaatggtcaaaa

SEQ ID NO: 10118 - DNA, 21 bp, Artificial Sequence
  Chr8_10 Reverse Primer
tggaaaagaaattttcccaaa

SEQ ID NO: 10119 - DNA, 20 bp, Artificial Sequence
  Chr8_10 Reverse Primer
ggcattgggtatctgctgtt

SEQ ID NO: 10120 - DNA, 23 bp, Artificial Sequence
  Chr8_10 Reverse Primer
tggctcttcttgcactaactctt

SEQ ID NO: 10121 - DNA, 23 bp, Artificial Sequence
  Chr8_10 Reverse Primer
caaagcacaaatgttgttacaga

SEQ ID NO: 10122 - DNA, 20 bp, Artificial Sequence
  Chr8_10 Reverse Primer
tttaaatgggcatcctgtgg

SEQ ID NO: 10123 - DNA, 20 bp, Artificial Sequence
  Chr8_10 Reverse Primer
agtgaaaatgaggcaggcat

SEQ ID NO: 10124 - DNA, 20 bp, Artificial Sequence
  Chr8_10 Reverse Primer
ggaatcttggaatccaccac

SEQ ID NO: 10125 - DNA, 19 bp, Artificial Sequence
  Chr8_10 Reverse Primer
gccttttattcctgccagc

SEQ ID NO: 10126 - DNA, 20 bp, Artificial Sequence
  Chr8_10 Reverse Primer
cgtccaacgtcttctaccct

SEQ ID NO: 10127 - DNA, 21 bp, Artificial Sequence
  Chr8_10 Reverse Primer
cccagtttgtagtccctttca

SEQ ID NO: 10128 - DNA, 20 bp, Artificial Sequence
  Chr8_10 Reverse Primer
aaggacaatgcttggcacac

SEQ ID NO: 10129 - DNA, 20 bp, Artificial Sequence
  Chr8_10 Reverse Primer
acattgcacacagattggga

SEQ ID NO: 10130 - DNA, 21 bp, Artificial Sequence
  Chr8_10 Reverse Primer
gaagtcaaattgaatgcccaa

SEQ ID NO: 10131 - DNA, 20 bp, Artificial Sequence
  Chr8_10 Reverse Primer
gtcaccattttacatggccc

SEQ ID NO: 10132 - DNA, 24 bp, Artificial Sequence
  Chr8_10 Reverse Primer
gcctttgtcatatcatcaaaaact

SEQ ID NO: 10133 - DNA, 27 bp, Artificial Sequence
  Chr8_10 Reverse Primer
ttctcaatatttttcttcatttttctg

SEQ ID NO: 10134 - DNA, 20 bp, Artificial Sequence
  Chr8_10 Reverse Primer
gttccctcttccttgcaaca

SEQ ID NO: 10135 - DNA, 20 bp, Artificial Sequence
  Chr8_10 Reverse Primer
ccctggatagagagttccca

SEQ ID NO: 10136 - DNA, 26 bp, Artificial Sequence
  Chr8_10 Reverse Primer
aaaatcattcatgaaaaataaaagcc

SEQ ID NO: 10137 - DNA, 19 bp, Artificial Sequence
  Chr8_10 Reverse Primer
gcaaatccaccgctgttta

SEQ ID NO: 10138 - DNA, 20 bp, Artificial Sequence
  Chr8_10 Reverse Primer
tttgtttcaagcaggagggt

SEQ ID NO: 10139 - DNA, 20 bp, Artificial Sequence
  Chr8_10 Reverse Primer
gtcggtaggttcctcccatt

SEQ ID NO: 10140 - DNA, 23 bp, Artificial Sequence
  Chr8_10 Reverse Primer
tctgtaacttgctttagcaatcc

SEQ ID NO: 10141 - DNA, 26 bp, Artificial Sequence
  Chr8_10 Reverse Primer
aagagttctgatattctatggtgctg

SEQ ID NO: 10142 - DNA, 20 bp, Artificial Sequence
  Chr8_10 Reverse Primer
cccaaagtttcatacaggca

SEQ ID NO: 10143 - DNA, 20 bp, Artificial Sequence
  Chr8_10 Reverse Primer
ctgtggagattgggacacct

SEQ ID NO: 10144 - DNA, 20 bp, Artificial Sequence
  Chr8_10 Reverse Primer
ttgctcagcttctcccagtt

SEQ ID NO: 10145 - DNA, 22 bp, Artificial Sequence
  Chr8_10 Reverse Primer
tgctgtgtaatgaacattcagg

SEQ ID NO: 10146 - DNA, 22 bp, Artificial Sequence
  Chr8_10 Reverse Primer
tgtgaagtgctacagaaaaggg

SEQ ID NO: 10147 - DNA, 24 bp, Artificial Sequence
  Chr8_10 Reverse Primer
tctcttcctaaacatctgggataa

SEQ ID NO: 10148 - DNA, 22 bp, Artificial Sequence
  Chr8_10 Reverse Primer
catttcaagaccaagagagggt

SEQ ID NO: 10149 - DNA, 20 bp, Artificial Sequence
  Chr8_10 Reverse Primer
atagttcaggtttggggcct

SEQ ID NO: 10150 - DNA, 20 bp, Artificial Sequence
  Chr8_10 Reverse Primer
atgcccatttgtttggagaa

SEQ ID NO: 10151 - DNA, 20 bp, Artificial Sequence
  Chr8_10 Reverse Primer
ttttgggggtaggtgttctc

SEQ ID NO: 10152 - DNA, 20 bp, Artificial Sequence
  Chr8_10 Reverse Primer
acagggcattgctaaaggtc

SEQ ID NO: 10153 - DNA, 20 bp, Artificial Sequence
  Chr8_10 Reverse Primer
tggtctacagctctctcgcc

SEQ ID NO: 10154 - DNA, 20 bp, Artificial Sequence
  Chr8_10 Reverse Primer
ttgtaatgtggtgcccaatc

SEQ ID NO: 10155 - DNA, 24 bp, Artificial Sequence
  Chr8_10 Reverse Primer
gacaattaggaaaactcttctcca

SEQ ID NO: 10156 - DNA, 21 bp, Artificial Sequence
  Chr8_10 Reverse Primer
caacaggtaattgtgtgctgc

SEQ ID NO: 10157 - DNA, 20 bp, Artificial Sequence
  Chr8_10 Reverse Primer
cacatgcacactaggtcggt

SEQ ID NO: 10158 - DNA, 20 bp, Artificial Sequence
  Chr8_10 Reverse Primer
caagtccaaaaatgcccaaa

SEQ ID NO: 10159 - DNA, 20 bp, Artificial Sequence
  Chr8_10 Reverse Primer
ttctcatcagtcttggggct

SEQ ID NO: 10160 - DNA, 20 bp, Artificial Sequence
  Chr8_10 Reverse Primer
agggcattgcctcttacaac

SEQ ID NO: 10161 - DNA, 20 bp, Artificial Sequence
  Chr8_10 Reverse Primer
cagggatgaaacctgaatgc

SEQ ID NO: 10162 - DNA, 23 bp, Artificial Sequence
  Chr8_10 Reverse Primer
gaaaacactcaaatgaatttcca

SEQ ID NO: 10163 - DNA, 20 bp, Artificial Sequence
  Chr8_10 Reverse Primer
tttcattagcatgaaggggg

SEQ ID NO: 10164 - DNA, 21 bp, Artificial Sequence
  Chr8_10 Reverse Primer
aggacatgctgaagaaatgga

SEQ ID NO: 10165 - DNA, 20 bp, Artificial Sequence
  Chr8_10 Reverse Primer
atgtgccaagcaattcacaa

SEQ ID NO: 10166 - DNA, 22 bp, Artificial Sequence
  Chr8_10 Reverse Primer
tttaccagatttgtcaggaggc

SEQ ID NO: 10167 - DNA, 19 bp, Artificial Sequence
  Chr8_10 Reverse Primer
cttggcaggggaaacaaat

SEQ ID NO: 10168 - DNA, 20 bp, Artificial Sequence
  Chr8_10 Reverse Primer
cacccctttggcagtctaat

SEQ ID NO: 10169 - DNA, 25 bp, Artificial Sequence
  Chr8_10 Reverse Primer
tgtcattctctacaaatgtttgctt

SEQ ID NO: 10170 - DNA, 20 bp, Artificial Sequence
  Chr8_10 Reverse Primer
gcaaggccaaacattctcat

SEQ ID NO: 10171 - DNA, 20 bp, Artificial Sequence
  Chr8_10 Reverse Primer
caatgcagtatgcctcagga

SEQ ID NO: 10172 - DNA, 20 bp, Artificial Sequence
  Chr8_10 Reverse Primer
tcatgggatgaggggaaata

SEQ ID NO: 10173 - DNA, 20 bp, Artificial Sequence
  Chr8_10 Reverse Primer
gatcagcctggacaccatct

SEQ ID NO: 10174 - DNA, 20 bp, Artificial Sequence
  Chr8_10 Reverse Primer
cgacaaaccttcacctggtc

SEQ ID NO: 10175 - DNA, 20 bp, Artificial Sequence
  Chr8_10 Reverse Primer
atgcaaatggagagtcaggg

SEQ ID NO: 10176 - DNA, 20 bp, Artificial Sequence
  Chr8_10 Reverse Primer
aatggagcagggcagtttta

SEQ ID NO: 10177 - DNA, 20 bp, Artificial Sequence
  Chr8_10 Reverse Primer
cccctccatctctcctaagc

SEQ ID NO: 10178 - DNA, 20 bp, Artificial Sequence
  Chr8_10 Reverse Primer
caagtcttgcctttgtgcag

SEQ ID NO: 10179 - DNA, 22 bp, Artificial Sequence
  Chr8_10 Reverse Primer
ggggtgacttgcattataaaaa

SEQ ID NO: 10180 - DNA, 22 bp, Artificial Sequence
  Chr8_10 Reverse Primer
ccttctgccttatgctaactgg

SEQ ID NO: 10181 - DNA, 20 bp, Artificial Sequence
  Chr8_10 Reverse Primer
gcgaacgagcaggtaaaaag

SEQ ID NO: 10182 - DNA, 20 bp, Artificial Sequence
  Chr8_10 Reverse Primer
gaatgaaaggagggaaagcc

SEQ ID NO: 10183 - DNA, 20 bp, Artificial Sequence
  Chr8_10 Reverse Primer
ctttgatgaccttggccagt

SEQ ID NO: 10184 - DNA, 20 bp, Artificial Sequence
  Chr8_10 Reverse Primer
gggtggagattggacatgag

SEQ ID NO: 10185 - DNA, 20 bp, Artificial Sequence
  Chr8_10 Reverse Primer
tctcacaagcatgaacacga

SEQ ID NO: 10186 - DNA, 20 bp, Artificial Sequence
  Chr8_10 Reverse Primer
tggtaactggtttgtggtgg

SEQ ID NO: 10187 - DNA, 20 bp, Artificial Sequence
  Chr8_10 Reverse Primer
gcgactccctgggttataca

SEQ ID NO: 10188 - DNA, 20 bp, Artificial Sequence
  Chr8_10 Reverse Primer
tggagctatgctttgcacac

SEQ ID NO: 10189 - DNA, 20 bp, Artificial Sequence
  Chr8_10 Reverse Primer
ctcctccaagaggaatgctg

SEQ ID NO: 10190 - DNA, 21 bp, Artificial Sequence
  Chr8_10 Reverse Primer
cgtcagatacttgattcccca

SEQ ID NO: 10191 - DNA, 20 bp, Artificial Sequence
  Chr8_10 Reverse Primer
tattctaatgcgaggacggg

SEQ ID NO: 10192 - DNA, 25 bp, Artificial Sequence
  Chr8_10 Reverse Primer
aacaaccttcaagatttatgagtgc

SEQ ID NO: 10193 - DNA, 20 bp, Artificial Sequence
  Chr8_11 Forward Primer
gggatgaagacaaccaggaa

SEQ ID NO: 10194 - DNA, 20 bp, Artificial Sequence
  Chr8_11 Forward Primer
catcaggtagggaccagcat

SEQ ID NO: 10195 - DNA, 20 bp, Artificial Sequence
  Chr8_11 Forward Primer
aatagtgcattcacaggccc

SEQ ID NO: 10196 - DNA, 20 bp, Artificial Sequence
  Chr8_11 Forward Primer
ccctggagatgctcacagtt

SEQ ID NO: 10197 - DNA, 20 bp, Artificial Sequence
  Chr8_11 Forward Primer
ctgcctggttgaggtaggag

SEQ ID NO: 10198 - DNA, 20 bp, Artificial Sequence
  Chr8_11 Forward Primer
agaaccaggcagcttgaaaa

SEQ ID NO: 10199 - DNA, 20 bp, Artificial Sequence
  Chr8_11 Forward Primer
aatggggtggaaaatgacaa

SEQ ID NO: 10200 - DNA, 20 bp, Artificial Sequence
  Chr8_11 Forward Primer
tggctagtgacagcaccttg

SEQ ID NO: 10201 - DNA, 20 bp, Artificial Sequence
  Chr8_11 Forward Primer
taggcccctcacacttcatc

SEQ ID NO: 10202 - DNA, 20 bp, Artificial Sequence
  Chr8_11 Forward Primer
gagtactggcatagtggccg

SEQ ID NO: 10203 - DNA, 20 bp, Artificial Sequence
  Chr8_11 Forward Primer
cacttctgctgcccaagttt

SEQ ID NO: 10204 - DNA, 20 bp, Artificial Sequence
  Chr8_11 Forward Primer
ttaagggctgcctagagggt

SEQ ID NO: 10205 - DNA, 20 bp, Artificial Sequence
  Chr8_11 Forward Primer
aacgaaacttcactgccctc

SEQ ID NO: 10206 - DNA, 20 bp, Artificial Sequence
  Chr8_11 Forward Primer
tggagactaaacccacgtcc

SEQ ID NO: 10207 - DNA, 20 bp, Artificial Sequence
  Chr8_11 Forward Primer
cccttctgggtgttcatgtc

SEQ ID NO: 10208 - DNA, 20 bp, Artificial Sequence
  Chr8_11 Forward Primer
accaacctcctgctgaaaaa

SEQ ID NO: 10209 - DNA, 20 bp, Artificial Sequence
  Chr8_11 Forward Primer
gtctgtcttggagctttgcc

SEQ ID NO: 10210 - DNA, 18 bp, Artificial Sequence
  Chr8_11 Forward Primer
gactcgccagcttcagga

SEQ ID NO: 10211 - DNA, 18 bp, Artificial Sequence
  Chr8_11 Forward Primer
ctgctgctgcagttggct

SEQ ID NO: 10212 - DNA, 20 bp, Artificial Sequence
  Chr8_11 Forward Primer
tcaccgtcctgtcactgtgt

SEQ ID NO: 10213 - DNA, 20 bp, Artificial Sequence
  Chr8_11 Forward Primer
aattgggcacagctctttgt

SEQ ID NO: 10214 - DNA, 20 bp, Artificial Sequence
  Chr8_11 Forward Primer
aggttagtgggattctgggg

SEQ ID NO: 10215 - DNA, 20 bp, Artificial Sequence
  Chr8_11 Forward Primer
tgtaccgatttcctggaagc

SEQ ID NO: 10216 - DNA, 20 bp, Artificial Sequence
  Chr8_11 Forward Primer
atgatgattcccattgcaca

SEQ ID NO: 10217 - DNA, 20 bp, Artificial Sequence
  Chr8_11 Forward Primer
ttagtggctcagtgaagggg

SEQ ID NO: 10218 - DNA, 20 bp, Artificial Sequence
  Chr8_11 Forward Primer
gaacagctcagtaggcaggg

SEQ ID NO: 10219 - DNA, 20 bp, Artificial Sequence
  Chr8_11 Forward Primer
ggatctcctaggctgcctct

SEQ ID NO: 10220 - DNA, 20 bp, Artificial Sequence
  Chr8_11 Forward Primer
tgggtggaaccagttttctc

SEQ ID NO: 10221 - DNA, 20 bp, Artificial Sequence
  Chr8_11 Forward Primer
gggaatcttttcccttccag

SEQ ID NO: 10222 - DNA, 20 bp, Artificial Sequence
  Chr8_11 Forward Primer
tggcttggcagcttctattt

SEQ ID NO: 10223 - DNA, 20 bp, Artificial Sequence
  Chr8_11 Forward Primer
ccagtgcctcggtaactcat

SEQ ID NO: 10224 - DNA, 21 bp, Artificial Sequence
  Chr8_11 Forward Primer
gaatggtagcccctctttttg

SEQ ID NO: 10225 - DNA, 20 bp, Artificial Sequence
  Chr8_11 Forward Primer
acagagggaagaggctggat

SEQ ID NO: 10226 - DNA, 20 bp, Artificial Sequence
  Chr8_11 Forward Primer
agtcaccagcacaacgatga

SEQ ID NO: 10227 - DNA, 20 bp, Artificial Sequence
  Chr8_11 Forward Primer
tggcctagaggagacgagaa

SEQ ID NO: 10228 - DNA, 20 bp, Artificial Sequence
  Chr8_11 Forward Primer
tggctgtcacctactcaggg

SEQ ID NO: 10229 - DNA, 20 bp, Artificial Sequence
  Chr8_11 Forward Primer
gccgcattggaacttttaac

SEQ ID NO: 10230 - DNA, 20 bp, Artificial Sequence
  Chr8_11 Forward Primer
ctctgaggacagggagttgc

SEQ ID NO: 10231 - DNA, 20 bp, Artificial Sequence
  Chr8_11 Forward Primer
gtttcatttctggcctgagc

SEQ ID NO: 10232 - DNA, 20 bp, Artificial Sequence
  Chr8_11 Forward Primer
atgttctgaccctgtggctc

SEQ ID NO: 10233 - DNA, 20 bp, Artificial Sequence
  Chr8_11 Forward Primer
cccatcatcccaatctcagt

SEQ ID NO: 10234 - DNA, 20 bp, Artificial Sequence
  Chr8_11 Forward Primer
cctccatccttgctgtcaat

SEQ ID NO: 10235 - DNA, 20 bp, Artificial Sequence
  Chr8_11 Forward Primer
tggggtaaggatttgcattc

SEQ ID NO: 10236 - DNA, 20 bp, Artificial Sequence
  Chr8_11 Forward Primer
aaatcttttcctgtgctgcg

SEQ ID NO: 10237 - DNA, 20 bp, Artificial Sequence
  Chr8_11 Forward Primer
aaggccctctgtgatcctct

SEQ ID NO: 10238 - DNA, 20 bp, Artificial Sequence
  Chr8_11 Forward Primer
gtaaaacggaggagaagggc

SEQ ID NO: 10239 - DNA, 20 bp, Artificial Sequence
  Chr8_11 Forward Primer
caccatcaagcccaaatctt

SEQ ID NO: 10240 - DNA, 20 bp, Artificial Sequence
  Chr8_11 Forward Primer
atacggatggtgggatgaaa

SEQ ID NO: 10241 - DNA, 23 bp, Artificial Sequence
  Chr8_11 Forward Primer
ttttatcaggaagaagcttttgg

SEQ ID NO: 10242 - DNA, 20 bp, Artificial Sequence
  Chr8_11 Forward Primer
catgcaacaaccataggcag

SEQ ID NO: 10243 - DNA, 20 bp, Artificial Sequence
  Chr8_11 Forward Primer
aaggggcattctcagttgtg

SEQ ID NO: 10244 - DNA, 20 bp, Artificial Sequence
  Chr8_11 Forward Primer
ggctttcaaacttctggctg

SEQ ID NO: 10245 - DNA, 20 bp, Artificial Sequence
  Chr8_11 Forward Primer
gatgaagtcttggcctctgc

SEQ ID NO: 10246 - DNA, 20 bp, Artificial Sequence
  Chr8_11 Forward Primer
cagttaaatggtccatgggg

SEQ ID NO: 10247 - DNA, 20 bp, Artificial Sequence
  Chr8_11 Forward Primer
ctaattcccaggacagtggc

SEQ ID NO: 10248 - DNA, 19 bp, Artificial Sequence
  Chr8_11 Forward Primer
gccctgaaggactgggtag

SEQ ID NO: 10249 - DNA, 20 bp, Artificial Sequence
  Chr8_11 Forward Primer
tcaggaggtgtggtcagaga

SEQ ID NO: 10250 - DNA, 20 bp, Artificial Sequence
  Chr8_11 Forward Primer
gcaaagcttcatggatgtga

SEQ ID NO: 10251 - DNA, 20 bp, Artificial Sequence
  Chr8_11 Forward Primer
ttctcttccggttcatggag

SEQ ID NO: 10252 - DNA, 20 bp, Artificial Sequence
  Chr8_11 Forward Primer
gcttcctccaacaattgacc

SEQ ID NO: 10253 - DNA, 20 bp, Artificial Sequence
  Chr8_11 Forward Primer
tttttggttgatccagaccc

SEQ ID NO: 10254 - DNA, 20 bp, Artificial Sequence
  Chr8_11 Forward Primer
gtgggagaaaacacttggga

SEQ ID NO: 10255 - DNA, 20 bp, Artificial Sequence
  Chr8_11 Forward Primer
gtggggatgcactgagaact

SEQ ID NO: 10256 - DNA, 21 bp, Artificial Sequence
  Chr8_11 Forward Primer
ccctacctgtctgctctttcc

SEQ ID NO: 10257 - DNA, 20 bp, Artificial Sequence
  Chr8_11 Forward Primer
ctgcccaaaccacaaagagt

SEQ ID NO: 10258 - DNA, 20 bp, Artificial Sequence
  Chr8_11 Forward Primer
ccagcaatttcaaatcctcc

SEQ ID NO: 10259 - DNA, 20 bp, Artificial Sequence
  Chr8_11 Forward Primer
ccttgtggagaatgggtttg

SEQ ID NO: 10260 - DNA, 20 bp, Artificial Sequence
  Chr8_11 Forward Primer
aaccatacacagcctttggc

SEQ ID NO: 10261 - DNA, 20 bp, Artificial Sequence
  Chr8_11 Forward Primer
gccttgatccaaccagctta

SEQ ID NO: 10262 - DNA, 24 bp, Artificial Sequence
  Chr8_11 Forward Primer
tgcatcataacaacatccatagaa

SEQ ID NO: 10263 - DNA, 20 bp, Artificial Sequence
  Chr8_11 Forward Primer
gggagattgatggatctgga

SEQ ID NO: 10264 - DNA, 20 bp, Artificial Sequence
  Chr8_11 Forward Primer
tagacgagatggtgagcgtg

SEQ ID NO: 10265 - DNA, 20 bp, Artificial Sequence
  Chr8_11 Forward Primer
ggcagtgctgtttttcctct

SEQ ID NO: 10266 - DNA, 20 bp, Artificial Sequence
  Chr8_11 Forward Primer
cctcatctcactgccagaca

SEQ ID NO: 10267 - DNA, 20 bp, Artificial Sequence
  Chr8_11 Forward Primer
ggcccaagtttgtctcatgt

SEQ ID NO: 10268 - DNA, 20 bp, Artificial Sequence
  Chr8_11 Forward Primer
ggactacctagctgcccctg

SEQ ID NO: 10269 - DNA, 20 bp, Artificial Sequence
  Chr8_11 Forward Primer
tatcgagaatgaagccccag

SEQ ID NO: 10270 - DNA, 20 bp, Artificial Sequence
  Chr8_11 Forward Primer
tgtccacttcattgctctgc

SEQ ID NO: 10271 - DNA, 20 bp, Artificial Sequence
  Chr8_11 Forward Primer
attagaagctccccctcagc

SEQ ID NO: 10272 - DNA, 20 bp, Artificial Sequence
  Chr8_11 Forward Primer
tccagatcttgcttttgctg

SEQ ID NO: 10273 - DNA, 20 bp, Artificial Sequence
  Chr8_11 Forward Primer
gagctgggttgtctgaaagc

SEQ ID NO: 10274 - DNA, 20 bp, Artificial Sequence
  Chr8_11 Forward Primer
ctcccactcaattcagcgat

SEQ ID NO: 10275 - DNA, 20 bp, Artificial Sequence
  Chr8_11 Forward Primer
tcacattctgatctgggctg

SEQ ID NO: 10276 - DNA, 20 bp, Artificial Sequence
  Chr8_11 Forward Primer
cgtctccctattttggagca

SEQ ID NO: 10277 - DNA, 20 bp, Artificial Sequence
  Chr8_11 Forward Primer
actctacggctctcaggcag

SEQ ID NO: 10278 - DNA, 20 bp, Artificial Sequence
  Chr8_11 Forward Primer
tctttgggtgtcagtttccc

SEQ ID NO: 10279 - DNA, 21 bp, Artificial Sequence
  Chr8_11 Forward Primer
ggtcaaaaagtagtgccaagc

SEQ ID NO: 10280 - DNA, 20 bp, Artificial Sequence
  Chr8_11 Forward Primer
gtcgaggcagagaagcagag

SEQ ID NO: 10281 - DNA, 20 bp, Artificial Sequence
  Chr8_11 Forward Primer
caggagaaaagtgaggccag

SEQ ID NO: 10282 - DNA, 20 bp, Artificial Sequence
  Chr8_11 Forward Primer
tacgtgtaaggcaggtgctc

SEQ ID NO: 10283 - DNA, 20 bp, Artificial Sequence
  Chr8_11 Forward Primer
tgaaggtgcaaatgaagggt

SEQ ID NO: 10284 - DNA, 20 bp, Artificial Sequence
  Chr8_11 Forward Primer
ctgcagaacaaccagcagag

SEQ ID NO: 10285 - DNA, 20 bp, Artificial Sequence
  Chr8_11 Forward Primer
tgacaagaaagtccccaaca

SEQ ID NO: 10286 - DNA, 20 bp, Artificial Sequence
  Chr8_11 Forward Primer
ggtgtggtggctcttgtctt

SEQ ID NO: 10287 - DNA, 20 bp, Artificial Sequence
  Chr8_11 Forward Primer
ggtggagtccaggagaacaa

SEQ ID NO: 10288 - DNA, 20 bp, Artificial Sequence
  Chr8_11 Forward Primer
tcaccaaagggaggaagatg

SEQ ID NO: 10289 - DNA, 20 bp, Artificial Sequence
  Chr8_11 Reverse Primer
tggcacaggatagatggtca

SEQ ID NO: 10290 - DNA, 20 bp, Artificial Sequence
  Chr8_11 Reverse Primer
gctaatacccgaggagggag

SEQ ID NO: 10291 - DNA, 21 bp, Artificial Sequence
  Chr8_11 Reverse Primer
caaaaagctcataaatgggga

SEQ ID NO: 10292 - DNA, 20 bp, Artificial Sequence
  Chr8_11 Reverse Primer
cccagggcagaataggtaca

SEQ ID NO: 10293 - DNA, 20 bp, Artificial Sequence
  Chr8_11 Reverse Primer
ctttagcgaacgacaaagcc

SEQ ID NO: 10294 - DNA, 20 bp, Artificial Sequence
  Chr8_11 Reverse Primer
ttcctagaatccctccaccc

SEQ ID NO: 10295 - DNA, 20 bp, Artificial Sequence
  Chr8_11 Reverse Primer
tctctgtagcccagagagcc

SEQ ID NO: 10296 - DNA, 20 bp, Artificial Sequence
  Chr8_11 Reverse Primer
tctgcccagatccttacagc

SEQ ID NO: 10297 - DNA, 20 bp, Artificial Sequence
  Chr8_11 Reverse Primer
gggtggacagctgtagaagg

SEQ ID NO: 10298 - DNA, 20 bp, Artificial Sequence
  Chr8_11 Reverse Primer
tagaaaaggctagaggcggg

SEQ ID NO: 10299 - DNA, 20 bp, Artificial Sequence
  Chr8_11 Reverse Primer
cttggaaaagaaccagccag

SEQ ID NO: 10300 - DNA, 20 bp, Artificial Sequence
  Chr8_11 Reverse Primer
gggaagaaatcctgcacaaa

SEQ ID NO: 10301 - DNA, 20 bp, Artificial Sequence
  Chr8_11 Reverse Primer
cagacttgttcctccttgcc

SEQ ID NO: 10302 - DNA, 20 bp, Artificial Sequence
  Chr8_11 Reverse Primer
ccttgggtgcaagcaagtat

SEQ ID NO: 10303 - DNA, 20 bp, Artificial Sequence
  Chr8_11 Reverse Primer
aagcacaggccaaacctcta

SEQ ID NO: 10304 - DNA, 20 bp, Artificial Sequence
  Chr8_11 Reverse Primer
caaaaagttcctctgctgcc

SEQ ID NO: 10305 - DNA, 20 bp, Artificial Sequence
  Chr8_11 Reverse Primer
ggggaaggtggcttctattc

SEQ ID NO: 10306 - DNA, 19 bp, Artificial Sequence
  Chr8_11 Reverse Primer
ctggagggaaacgagcaag

SEQ ID NO: 10307 - DNA, 19 bp, Artificial Sequence
  Chr8_11 Reverse Primer
gaacgctgtctgtctggca

SEQ ID NO: 10308 - DNA, 20 bp, Artificial Sequence
  Chr8_11 Reverse Primer
agttcattggtctgggcatc

SEQ ID NO: 10309 - DNA, 20 bp, Artificial Sequence
  Chr8_11 Reverse Primer
cctctgcttctgtcattccc

SEQ ID NO: 10310 - DNA, 20 bp, Artificial Sequence
  Chr8_11 Reverse Primer
tttccgaggaggaactgaga

SEQ ID NO: 10311 - DNA, 20 bp, Artificial Sequence
  Chr8_11 Reverse Primer
tgtcacctgctgacttgagg

SEQ ID NO: 10312 - DNA, 20 bp, Artificial Sequence
  Chr8_11 Reverse Primer
gcctcagaagaaccagacca

SEQ ID NO: 10313 - DNA, 26 bp, Artificial Sequence
  Chr8_11 Reverse Primer
tgtgatttaaaagaaagtgtggtctt

SEQ ID NO: 10314 - DNA, 20 bp, Artificial Sequence
  Chr8_11 Reverse Primer
agggctgactgtctaggggt

SEQ ID NO: 10315 - DNA, 20 bp, Artificial Sequence
  Chr8_11 Reverse Primer
ataaaggaatttccggcctc

SEQ ID NO: 10316 - DNA, 20 bp, Artificial Sequence
  Chr8_11 Reverse Primer
tgacctgtcgagtccagttg

SEQ ID NO: 10317 - DNA, 20 bp, Artificial Sequence
  Chr8_11 Reverse Primer
gagcagcgtagtttcaaggg

SEQ ID NO: 10318 - DNA, 20 bp, Artificial Sequence
  Chr8_11 Reverse Primer
gcagagcccagaagtaccat

SEQ ID NO: 10319 - DNA, 20 bp, Artificial Sequence
  Chr8_11 Reverse Primer
tgaggcagaactggaactca

SEQ ID NO: 10320 - DNA, 26 bp, Artificial Sequence
  Chr8_11 Reverse Primer
aaaaatcctttaaatttctctgaacc

SEQ ID NO: 10321 - DNA, 20 bp, Artificial Sequence
  Chr8_11 Reverse Primer
gcagatggcagaaggatagg

SEQ ID NO: 10322 - DNA, 21 bp, Artificial Sequence
  Chr8_11 Reverse Primer
tctcactgcctgaaacagcta

SEQ ID NO: 10323 - DNA, 20 bp, Artificial Sequence
  Chr8_11 Reverse Primer
tcctttggaaaacaaggtgg

SEQ ID NO: 10324 - DNA, 20 bp, Artificial Sequence
  Chr8_11 Reverse Primer
acacacacacacacgcacat

SEQ ID NO: 10325 - DNA, 20 bp, Artificial Sequence
  Chr8_11 Reverse Primer
gagatggaaagctctggtgg

SEQ ID NO: 10326 - DNA, 20 bp, Artificial Sequence
  Chr8_11 Reverse Primer
tgactcaggattccaccaca

SEQ ID NO: 10327 - DNA, 20 bp, Artificial Sequence
  Chr8_11 Reverse Primer
agtcagggatctgtggcatc

SEQ ID NO: 10328 - DNA, 20 bp, Artificial Sequence
  Chr8_11 Reverse Primer
ggtttctgagctctgccatt

SEQ ID NO: 10329 - DNA, 20 bp, Artificial Sequence
  Chr8_11 Reverse Primer
aaggctggagatcgtaggct

SEQ ID NO: 10330 - DNA, 20 bp, Artificial Sequence
  Chr8_11 Reverse Primer
tgaggatccagcagtgaaca

SEQ ID NO: 10331 - DNA, 20 bp, Artificial Sequence
  Chr8_11 Reverse Primer
ccagatctgatttctgcgtg

SEQ ID NO: 10332 - DNA, 20 bp, Artificial Sequence
  Chr8_11 Reverse Primer
tggagtgggaaggagtcttg

SEQ ID NO: 10333 - DNA, 20 bp, Artificial Sequence
  Chr8_11 Reverse Primer
tcccttcgctctgtctctgt

SEQ ID NO: 10334 - DNA, 20 bp, Artificial Sequence
  Chr8_11 Reverse Primer
atcttgatggaattgcaggc

SEQ ID NO: 10335 - DNA, 20 bp, Artificial Sequence
  Chr8_11 Reverse Primer
ctgcagccaggaaacttgat

SEQ ID NO: 10336 - DNA, 20 bp, Artificial Sequence
  Chr8_11 Reverse Primer
ccgcagttgattccaatgtt

SEQ ID NO: 10337 - DNA, 20 bp, Artificial Sequence
  Chr8_11 Reverse Primer
caaccagcctgagaaagagg

SEQ ID NO: 10338 - DNA, 20 bp, Artificial Sequence
  Chr8_11 Reverse Primer
ttgaattattgtgccagcca

SEQ ID NO: 10339 - DNA, 19 bp, Artificial Sequence
  Chr8_11 Reverse Primer
aagccagcagttacccagg

SEQ ID NO: 10340 - DNA, 20 bp, Artificial Sequence
  Chr8_11 Reverse Primer
gaggacaaaagcggtcagag

SEQ ID NO: 10341 - DNA, 20 bp, Artificial Sequence
  Chr8_11 Reverse Primer
gcaacgcacacggactaata

SEQ ID NO: 10342 - DNA, 20 bp, Artificial Sequence
  Chr8_11 Reverse Primer
tctgagcttaagaggcctgg

SEQ ID NO: 10343 - DNA, 20 bp, Artificial Sequence
  Chr8_11 Reverse Primer
ccccatctagagcacttgga

SEQ ID NO: 10344 - DNA, 20 bp, Artificial Sequence
  Chr8_11 Reverse Primer
tgcacttgcggatgtgtaat

SEQ ID NO: 10345 - DNA, 20 bp, Artificial Sequence
  Chr8_11 Reverse Primer
tcctagagggcaggatggta

SEQ ID NO: 10346 - DNA, 20 bp, Artificial Sequence
  Chr8_11 Reverse Primer
aatgcaaggacacatggtga

SEQ ID NO: 10347 - DNA, 20 bp, Artificial Sequence
  Chr8_11 Reverse Primer
tgagattccacaaacgtcca

SEQ ID NO: 10348 - DNA, 20 bp, Artificial Sequence
  Chr8_11 Reverse Primer
tgcttgggttctgtgtttca

SEQ ID NO: 10349 - DNA, 20 bp, Artificial Sequence
  Chr8_11 Reverse Primer
caattggaaaatccactgcc

SEQ ID NO: 10350 - DNA, 20 bp, Artificial Sequence
  Chr8_11 Reverse Primer
ccacctctcttcccatctca

SEQ ID NO: 10351 - DNA, 20 bp, Artificial Sequence
  Chr8_11 Reverse Primer
atctcttcccagtgctgcat

SEQ ID NO: 10352 - DNA, 20 bp, Artificial Sequence
  Chr8_11 Reverse Primer
aaagcaccagctagccacat

SEQ ID NO: 10353 - DNA, 20 bp, Artificial Sequence
  Chr8_11 Reverse Primer
gacctaaggggttggcaaat

SEQ ID NO: 10354 - DNA, 20 bp, Artificial Sequence
  Chr8_11 Reverse Primer
accatcagagagtgggcaag

SEQ ID NO: 10355 - DNA, 20 bp, Artificial Sequence
  Chr8_11 Reverse Primer
ggccctatgaaggctgtgta

SEQ ID NO: 10356 - DNA, 20 bp, Artificial Sequence
  Chr8_11 Reverse Primer
atgatcacttcgagttgggg

SEQ ID NO: 10357 - DNA, 20 bp, Artificial Sequence
  Chr8_11 Reverse Primer
ctacagccatttggcaaaca

SEQ ID NO: 10358 - DNA, 23 bp, Artificial Sequence
  Chr8_11 Reverse Primer
tgaaggtgctcttagcatagtct

SEQ ID NO: 10359 - DNA, 20 bp, Artificial Sequence
  Chr8_11 Reverse Primer
gaccctgcttcccatgaata

SEQ ID NO: 10360 - DNA, 20 bp, Artificial Sequence
  Chr8_11 Reverse Primer
agagaaatgccaaggggagt

SEQ ID NO: 10361 - DNA, 20 bp, Artificial Sequence
  Chr8_11 Reverse Primer
caaggcactcacagtcgtgt

SEQ ID NO: 10362 - DNA, 20 bp, Artificial Sequence
  Chr8_11 Reverse Primer
gaagcccctgaaactgaaca

SEQ ID NO: 10363 - DNA, 20 bp, Artificial Sequence
  Chr8_11 Reverse Primer
ttccaaccactacctcgacc

SEQ ID NO: 10364 - DNA, 20 bp, Artificial Sequence
  Chr8_11 Reverse Primer
tcagtggccctcctaacaac

SEQ ID NO: 10365 - DNA, 20 bp, Artificial Sequence
  Chr8_11 Reverse Primer
agtgagcacagggcaagact

SEQ ID NO: 10366 - DNA, 20 bp, Artificial Sequence
  Chr8_11 Reverse Primer
gaagagcctgtctgagggtg

SEQ ID NO: 10367 - DNA, 20 bp, Artificial Sequence
  Chr8_11 Reverse Primer
ttggggagtttgaagacagc

SEQ ID NO: 10368 - DNA, 20 bp, Artificial Sequence
  Chr8_11 Reverse Primer
cccatggagctagcagagtc

SEQ ID NO: 10369 - DNA, 20 bp, Artificial Sequence
  Chr8_11 Reverse Primer
tcgcccagatcctaaagaga

SEQ ID NO: 10370 - DNA, 20 bp, Artificial Sequence
  Chr8_11 Reverse Primer
cttcctcatttccaaccagc

SEQ ID NO: 10371 - DNA, 20 bp, Artificial Sequence
  Chr8_11 Reverse Primer
tgccatttcctcaacaacaa

SEQ ID NO: 10372 - DNA, 20 bp, Artificial Sequence
  Chr8_11 Reverse Primer
agcagtgtgtgaaccccagt

SEQ ID NO: 10373 - DNA, 20 bp, Artificial Sequence
  Chr8_11 Reverse Primer
agcacctgactggcttgtct

SEQ ID NO: 10374 - DNA, 23 bp, Artificial Sequence
  Chr8_11 Reverse Primer
tccgactttttgaatcctttaga

SEQ ID NO: 10375 - DNA, 20 bp, Artificial Sequence
  Chr8_11 Reverse Primer
tgggaatcagactagccagg

SEQ ID NO: 10376 - DNA, 20 bp, Artificial Sequence
  Chr8_11 Reverse Primer
cccaaatgcaaccagaaaac

SEQ ID NO: 10377 - DNA, 20 bp, Artificial Sequence
  Chr8_11 Reverse Primer
catcaggtagccaatgagca

SEQ ID NO: 10378 - DNA, 20 bp, Artificial Sequence
  Chr8_11 Reverse Primer
attgaatgtgctcgtttccc

SEQ ID NO: 10379 - DNA, 20 bp, Artificial Sequence
  Chr8_11 Reverse Primer
acccaagggaaaagattgct

SEQ ID NO: 10380 - DNA, 20 bp, Artificial Sequence
  Chr8_11 Reverse Primer
cagaagttgggagttttgcc

SEQ ID NO: 10381 - DNA, 21 bp, Artificial Sequence
  Chr8_11 Reverse Primer
tctccatctcagttggtagcc

SEQ ID NO: 10382 - DNA, 20 bp, Artificial Sequence
  Chr8_11 Reverse Primer
taattggaaggactgcaggg

SEQ ID NO: 10383 - DNA, 20 bp, Artificial Sequence
  Chr8_11 Reverse Primer
aagtccaaagttcagcccct

SEQ ID NO: 10384 - DNA, 20 bp, Artificial Sequence
  Chr8_11 Reverse Primer
aggcttctgcatctggctaa

SEQ ID NO: 10385 - DNA, 20 bp, Artificial Sequence
  Chr8_12 Forward Primer
tgaagtgagaggcagtggtg

SEQ ID NO: 10386 - DNA, 20 bp, Artificial Sequence
  Chr8_12 Forward Primer
gaaccaagagagaaaggccc

SEQ ID NO: 10387 - DNA, 20 bp, Artificial Sequence
  Chr8_12 Forward Primer
agcccatgggtatgacttgt

SEQ ID NO: 10388 - DNA, 20 bp, Artificial Sequence
  Chr8_12 Forward Primer
aatatttgggggtggccata

SEQ ID NO: 10389 - DNA, 26 bp, Artificial Sequence
  Chr8_12 Forward Primer
tctcatgatacagtaagcatcacatt

SEQ ID NO: 10390 - DNA, 20 bp, Artificial Sequence
  Chr8_12 Forward Primer
gcctcagaagagggtggtta

SEQ ID NO: 10391 - DNA, 20 bp, Artificial Sequence
  Chr8_12 Forward Primer
tatttgtgcggtgcaagaag

SEQ ID NO: 10392 - DNA, 20 bp, Artificial Sequence
  Chr8_12 Forward Primer
aactgccctcatttcattgc

SEQ ID NO: 10393 - DNA, 20 bp, Artificial Sequence
  Chr8_12 Forward Primer
gttgggttgtttctagccca

SEQ ID NO: 10394 - DNA, 22 bp, Artificial Sequence
  Chr8_12 Forward Primer
tgtctttgtgtgtgcttctcag

SEQ ID NO: 10395 - DNA, 20 bp, Artificial Sequence
  Chr8_12 Forward Primer
acacatgcattccagagggt

SEQ ID NO: 10396 - DNA, 20 bp, Artificial Sequence
  Chr8_12 Forward Primer
agagcaggaaaggatgctga

SEQ ID NO: 10397 - DNA, 21 bp, Artificial Sequence
  Chr8_12 Forward Primer
tccaggtagaaatgaagtgcc

SEQ ID NO: 10398 - DNA, 20 bp, Artificial Sequence
  Chr8_12 Forward Primer
cccatgcttataccatgcct

SEQ ID NO: 10399 - DNA, 20 bp, Artificial Sequence
  Chr8_12 Forward Primer
accccagtatgaatggcttg

SEQ ID NO: 10400 - DNA, 20 bp, Artificial Sequence
  Chr8_12 Forward Primer
gaccccttcaatcccaaaag

SEQ ID NO: 10401 - DNA, 20 bp, Artificial Sequence
  Chr8_12 Forward Primer
ttaacagggcaaaggaatgg

SEQ ID NO: 10402 - DNA, 20 bp, Artificial Sequence
  Chr8_12 Forward Primer
tgttttggagccttggttct

SEQ ID NO: 10403 - DNA, 20 bp, Artificial Sequence
  Chr8_12 Forward Primer
ctctgaaaccaccagaagca

SEQ ID NO: 10404 - DNA, 20 bp, Artificial Sequence
  Chr8_12 Forward Primer
gcttcctagagatcccctgc

SEQ ID NO: 10405 - DNA, 20 bp, Artificial Sequence
  Chr8_12 Forward Primer
cccaaagaaacccaacttca

SEQ ID NO: 10406 - DNA, 20 bp, Artificial Sequence
  Chr8_12 Forward Primer
ccagaggtaattcacaggca

SEQ ID NO: 10407 - DNA, 20 bp, Artificial Sequence
  Chr8_12 Forward Primer
ccagggaaacatgaggacat

SEQ ID NO: 10408 - DNA, 20 bp, Artificial Sequence
  Chr8_12 Forward Primer
acccttgataagtccccacc

SEQ ID NO: 10409 - DNA, 25 bp, Artificial Sequence
  Chr8_12 Forward Primer
aaagaaaaatactgtgagcaggaaa

SEQ ID NO: 10410 - DNA, 27 bp, Artificial Sequence
  Chr8_12 Forward Primer
tgtacatctttactggacaaactaaaa

SEQ ID NO: 10411 - DNA, 20 bp, Artificial Sequence
  Chr8_12 Forward Primer
aggacccttggggtcagtat

SEQ ID NO: 10412 - DNA, 20 bp, Artificial Sequence
  Chr8_12 Forward Primer
gatccttcgggaacaagcat

SEQ ID NO: 10413 - DNA, 20 bp, Artificial Sequence
  Chr8_12 Forward Primer
ctgaggtaaaaagggagggg

SEQ ID NO: 10414 - DNA, 25 bp, Artificial Sequence
  Chr8_12 Forward Primer
aaaaattgataagtaggcaggtgaa

SEQ ID NO: 10415 - DNA, 20 bp, Artificial Sequence
  Chr8_12 Forward Primer
gcataaaccccaaacaaagc

SEQ ID NO: 10416 - DNA, 22 bp, Artificial Sequence
  Chr8_12 Forward Primer
tgtattttccctgatgaaaacc

SEQ ID NO: 10417 - DNA, 20 bp, Artificial Sequence
  Chr8_12 Forward Primer
ccggcaaaagaatttgagaa

SEQ ID NO: 10418 - DNA, 20 bp, Artificial Sequence
  Chr8_12 Forward Primer
tgggagcatttaatgtggtg

SEQ ID NO: 10419 - DNA, 20 bp, Artificial Sequence
  Chr8_12 Forward Primer
ggctcccttttagtgaggct

SEQ ID NO: 10420 - DNA, 24 bp, Artificial Sequence
  Chr8_12 Forward Primer
ttgtgaacaatacctaaaccttcg

SEQ ID NO: 10421 - DNA, 21 bp, Artificial Sequence
  Chr8_12 Forward Primer
tttcattgccctaagagtgct

SEQ ID NO: 10422 - DNA, 23 bp, Artificial Sequence
  Chr8_12 Forward Primer
tgctagtactcttccaacactgc

SEQ ID NO: 10423 - DNA, 20 bp, Artificial Sequence
  Chr8_12 Forward Primer
agaagagcctgagactgcca

SEQ ID NO: 10424 - DNA, 20 bp, Artificial Sequence
  Chr8_12 Forward Primer
attgccacacactgcagaag

SEQ ID NO: 10425 - DNA, 20 bp, Artificial Sequence
  Chr8_12 Forward Primer
caactggcacaggaaaaaca

SEQ ID NO: 10426 - DNA, 20 bp, Artificial Sequence
  Chr8_12 Forward Primer
attcccaggtgcttcagaga

SEQ ID NO: 10427 - DNA, 24 bp, Artificial Sequence
  Chr8_12 Forward Primer
ttactcattttccaaactgtggtc

SEQ ID NO: 10428 - DNA, 20 bp, Artificial Sequence
  Chr8_12 Forward Primer
gctgcaaaggcacaagaaat

SEQ ID NO: 10429 - DNA, 20 bp, Artificial Sequence
  Chr8_12 Forward Primer
tggcacagtcatgagtcaca

SEQ ID NO: 10430 - DNA, 25 bp, Artificial Sequence
  Chr8_12 Forward Primer
ggcactcagacatttctcatctatt

SEQ ID NO: 10431 - DNA, 20 bp, Artificial Sequence
  Chr8_12 Forward Primer
ggtgcttagcagcctgagag

SEQ ID NO: 10432 - DNA, 27 bp, Artificial Sequence
  Chr8_12 Forward Primer
cagctcatactttgtatattagtccca

SEQ ID NO: 10433 - DNA, 25 bp, Artificial Sequence
  Chr8_12 Forward Primer
cctcctgttactctaagctttcctt

SEQ ID NO: 10434 - DNA, 23 bp, Artificial Sequence
  Chr8_12 Forward Primer
tggtcaatagttcaatgatccaa

SEQ ID NO: 10435 - DNA, 22 bp, Artificial Sequence
  Chr8_12 Forward Primer
gagaaaagtgggatgaatgtga

SEQ ID NO: 10436 - DNA, 21 bp, Artificial Sequence
  Chr8_12 Forward Primer
cctgatcaaaccatcttggaa

SEQ ID NO: 10437 - DNA, 21 bp, Artificial Sequence
  Chr8_12 Forward Primer
tctgtggctccagaaaaatct

SEQ ID NO: 10438 - DNA, 20 bp, Artificial Sequence
  Chr8_12 Forward Primer
ccacctgcaatacaaagagc

SEQ ID NO: 10439 - DNA, 24 bp, Artificial Sequence
  Chr8_12 Forward Primer
tgacattgaagttaaaggtgtgtg

SEQ ID NO: 10440 - DNA, 20 bp, Artificial Sequence
  Chr8_12 Forward Primer
cagctgacaccaatggtcaa

SEQ ID NO: 10441 - DNA, 20 bp, Artificial Sequence
  Chr8_12 Forward Primer
tgacctaacaaacggcatga

SEQ ID NO: 10442 - DNA, 21 bp, Artificial Sequence
  Chr8_12 Forward Primer
ccttgctatttgtcacaaggg

SEQ ID NO: 10443 - DNA, 21 bp, Artificial Sequence
  Chr8_12 Forward Primer
tttggcttcccatactcacat

SEQ ID NO: 10444 - DNA, 20 bp, Artificial Sequence
  Chr8_12 Forward Primer
atctgtcactgcgattgtgg

SEQ ID NO: 10445 - DNA, 20 bp, Artificial Sequence
  Chr8_12 Forward Primer
gatagttcccctctcccctg

SEQ ID NO: 10446 - DNA, 20 bp, Artificial Sequence
  Chr8_12 Forward Primer
ttgtcgcatagatgctgtcc

SEQ ID NO: 10447 - DNA, 20 bp, Artificial Sequence
  Chr8_12 Forward Primer
tgttcatcctgagaggctcc

SEQ ID NO: 10448 - DNA, 20 bp, Artificial Sequence
  Chr8_12 Forward Primer
atgtcccaagaaaatgccaa

SEQ ID NO: 10449 - DNA, 20 bp, Artificial Sequence
  Chr8_12 Forward Primer
tttaggggtgtccatccaaa

SEQ ID NO: 10450 - DNA, 20 bp, Artificial Sequence
  Chr8_12 Forward Primer
tcagtggcactcttcaccag

SEQ ID NO: 10451 - DNA, 20 bp, Artificial Sequence
  Chr8_12 Forward Primer
tcctgttgccaaatctcaca

SEQ ID NO: 10452 - DNA, 20 bp, Artificial Sequence
  Chr8_12 Forward Primer
tcctgaaaaggggaagttca

SEQ ID NO: 10453 - DNA, 24 bp, Artificial Sequence
  Chr8_12 Forward Primer
gaaatttatttctccaaatcccaa

SEQ ID NO: 10454 - DNA, 20 bp, Artificial Sequence
  Chr8_12 Forward Primer
tattgcacttccaacctgcc

SEQ ID NO: 10455 - DNA, 20 bp, Artificial Sequence
  Chr8_12 Forward Primer
tttttctggtcagcaggtcc

SEQ ID NO: 10456 - DNA, 20 bp, Artificial Sequence
  Chr8_12 Forward Primer
ggaaatgtgagttccttgcc

SEQ ID NO: 10457 - DNA, 20 bp, Artificial Sequence
  Chr8_12 Forward Primer
ttcctcctcagcttggacat

SEQ ID NO: 10458 - DNA, 20 bp, Artificial Sequence
  Chr8_12 Forward Primer
aaggcccttcatggtagaca

SEQ ID NO: 10459 - DNA, 27 bp, Artificial Sequence
  Chr8_12 Forward Primer
aaaagtgaagcataatttacttgtcag

SEQ ID NO: 10460 - DNA, 21 bp, Artificial Sequence
  Chr8_12 Forward Primer
ttgagccttatgattgcagtg

SEQ ID NO: 10461 - DNA, 20 bp, Artificial Sequence
  Chr8_12 Forward Primer
ttttgctttatggtgagccc

SEQ ID NO: 10462 - DNA, 26 bp, Artificial Sequence
  Chr8_12 Forward Primer
aattctacttaatctcctgagggaca

SEQ ID NO: 10463 - DNA, 20 bp, Artificial Sequence
  Chr8_12 Forward Primer
tttaggttgagtgggaacgg

SEQ ID NO: 10464 - DNA, 24 bp, Artificial Sequence
  Chr8_12 Forward Primer
ggaagaaaccagaaagtatgtgtg

SEQ ID NO: 10465 - DNA, 20 bp, Artificial Sequence
  Chr8_12 Forward Primer
ttcctttcctttccttttcc

SEQ ID NO: 10466 - DNA, 25 bp, Artificial Sequence
  Chr8_12 Forward Primer
catgataacactgagaatcagaagg

SEQ ID NO: 10467 - DNA, 21 bp, Artificial Sequence
  Chr8_12 Forward Primer
ggtgcctatgtttcatttcca

SEQ ID NO: 10468 - DNA, 20 bp, Artificial Sequence
  Chr8_12 Forward Primer
tgttcccaggacagaacaga

SEQ ID NO: 10469 - DNA, 21 bp, Artificial Sequence
  Chr8_12 Forward Primer
cagagctaaagcaaagcagga

SEQ ID NO: 10470 - DNA, 19 bp, Artificial Sequence
  Chr8_12 Forward Primer
ggggcttcatgtggtctct

SEQ ID NO: 10471 - DNA, 24 bp, Artificial Sequence
  Chr8_12 Forward Primer
tcatagaatctaggcacagagacc

SEQ ID NO: 10472 - DNA, 20 bp, Artificial Sequence
  Chr8_12 Forward Primer
acacgatgggaatctcacaa

SEQ ID NO: 10473 - DNA, 20 bp, Artificial Sequence
  Chr8_12 Forward Primer
tccacacatgatagcccaaa

SEQ ID NO: 10474 - DNA, 27 bp, Artificial Sequence
  Chr8_12 Forward Primer
gtaatgtgacagacataactgaatgtt

SEQ ID NO: 10475 - DNA, 21 bp, Artificial Sequence
  Chr8_12 Forward Primer
cctcacacaaatttgatgcac

SEQ ID NO: 10476 - DNA, 20 bp, Artificial Sequence
  Chr8_12 Forward Primer
cccgctttcctggtatttct

SEQ ID NO: 10477 - DNA, 20 bp, Artificial Sequence
  Chr8_12 Forward Primer
tggggcaaataggtcaacat

SEQ ID NO: 10478 - DNA, 20 bp, Artificial Sequence
  Chr8_12 Forward Primer
gtggctggaaaaaggttggt

SEQ ID NO: 10479 - DNA, 22 bp, Artificial Sequence
  Chr8_12 Forward Primer
aatgcttttgttgatggaattt

SEQ ID NO: 10480 - DNA, 22 bp, Artificial Sequence
  Chr8_12 Forward Primer
gtcaataatcatcagctctggc

SEQ ID NO: 10481 - DNA, 20 bp, Artificial Sequence
  Chr8_12 Reverse Primer
tctaaggcctccagcacagt

SEQ ID NO: 10482 - DNA, 20 bp, Artificial Sequence
  Chr8_12 Reverse Primer
gccctctacagccctctctt

SEQ ID NO: 10483 - DNA, 20 bp, Artificial Sequence
  Chr8_12 Reverse Primer
cccagacgttctgaagcatt

SEQ ID NO: 10484 - DNA, 20 bp, Artificial Sequence
  Chr8_12 Reverse Primer
ttcctccacccttgattcag

SEQ ID NO: 10485 - DNA, 21 bp, Artificial Sequence
  Chr8_12 Reverse Primer
tgatggcatgagttacacacc

SEQ ID NO: 10486 - DNA, 20 bp, Artificial Sequence
  Chr8_12 Reverse Primer
gagggaggttagtgacacgc

SEQ ID NO: 10487 - DNA, 20 bp, Artificial Sequence
  Chr8_12 Reverse Primer
tccttcatggcttgaggttt

SEQ ID NO: 10488 - DNA, 20 bp, Artificial Sequence
  Chr8_12 Reverse Primer
tctacgctgctcacaacagg

SEQ ID NO: 10489 - DNA, 20 bp, Artificial Sequence
  Chr8_12 Reverse Primer
aatgggcaggagaaggtagg

SEQ ID NO: 10490 - DNA, 21 bp, Artificial Sequence
  Chr8_12 Reverse Primer
ccacttcttgtgaattgggag

SEQ ID NO: 10491 - DNA, 20 bp, Artificial Sequence
  Chr8_12 Reverse Primer
cccaaaggcctaccaaagat

SEQ ID NO: 10492 - DNA, 20 bp, Artificial Sequence
  Chr8_12 Reverse Primer
attttcctctgtggatggca

SEQ ID NO: 10493 - DNA, 20 bp, Artificial Sequence
  Chr8_12 Reverse Primer
ctggctacctgctcacacaa

SEQ ID NO: 10494 - DNA, 20 bp, Artificial Sequence
  Chr8_12 Reverse Primer
tttcaagggcacctaaagga

SEQ ID NO: 10495 - DNA, 20 bp, Artificial Sequence
  Chr8_12 Reverse Primer
gccataacaaagtggctggt

SEQ ID NO: 10496 - DNA, 23 bp, Artificial Sequence
  Chr8_12 Reverse Primer
ttggattttagatcatgagttgc

SEQ ID NO: 10497 - DNA, 20 bp, Artificial Sequence
  Chr8_12 Reverse Primer
tgtgcttctggagaatgctg

SEQ ID NO: 10498 - DNA, 20 bp, Artificial Sequence
  Chr8_12 Reverse Primer
aatcacttgggtgcctgaat

SEQ ID NO: 10499 - DNA, 20 bp, Artificial Sequence
  Chr8_12 Reverse Primer
tgttagccagcagctcttcc

SEQ ID NO: 10500 - DNA, 20 bp, Artificial Sequence
  Chr8_12 Reverse Primer
catgtattgaagccaggcaa

SEQ ID NO: 10501 - DNA, 20 bp, Artificial Sequence
  Chr8_12 Reverse Primer
gtcaatgatctggggaatgc

SEQ ID NO: 10502 - DNA, 20 bp, Artificial Sequence
  Chr8_12 Reverse Primer
gagcaaaggaatacaggcca

SEQ ID NO: 10503 - DNA, 22 bp, Artificial Sequence
  Chr8_12 Reverse Primer
tgcctccaagttcattaagaca

SEQ ID NO: 10504 - DNA, 21 bp, Artificial Sequence
  Chr8_12 Reverse Primer
caggtcaaaagccttgacaga

SEQ ID NO: 10505 - DNA, 27 bp, Artificial Sequence
  Chr8_12 Reverse Primer
aaaaattggtatcttaaatctgcttca

SEQ ID NO: 10506 - DNA, 23 bp, Artificial Sequence
  Chr8_12 Reverse Primer
aaatccactgttctcatactggc

SEQ ID NO: 10507 - DNA, 20 bp, Artificial Sequence
  Chr8_12 Reverse Primer
gcttaccagaatttgcaggg

SEQ ID NO: 10508 - DNA, 21 bp, Artificial Sequence
  Chr8_12 Reverse Primer
ccccaaagggtacatttcttc

SEQ ID NO: 10509 - DNA, 21 bp, Artificial Sequence
  Chr8_12 Reverse Primer
tgctatttcccaatacctgct

SEQ ID NO: 10510 - DNA, 23 bp, Artificial Sequence
  Chr8_12 Reverse Primer
tgagaaaaagaggcaagagaaaa

SEQ ID NO: 10511 - DNA, 20 bp, Artificial Sequence
  Chr8_12 Reverse Primer
gcgaaagggaataagcaaca

SEQ ID NO: 10512 - DNA, 20 bp, Artificial Sequence
  Chr8_12 Reverse Primer
ccttgggacattttctgaca

SEQ ID NO: 10513 - DNA, 20 bp, Artificial Sequence
  Chr8_12 Reverse Primer
acccttcattgtggatggag

SEQ ID NO: 10514 - DNA, 21 bp, Artificial Sequence
  Chr8_12 Reverse Primer
ccgtaatctgtcttcttgctg

SEQ ID NO: 10515 - DNA, 21 bp, Artificial Sequence
  Chr8_12 Reverse Primer
cacttcttaccccaggactca

SEQ ID NO: 10516 - DNA, 27 bp, Artificial Sequence
  Chr8_12 Reverse Primer
ggaatgtgtatttttaaatatttcctc

SEQ ID NO: 10517 - DNA, 24 bp, Artificial Sequence
  Chr8_12 Reverse Primer
tgcaaaatgtagagtttttggaat

SEQ ID NO: 10518 - DNA, 22 bp, Artificial Sequence
  Chr8_12 Reverse Primer
cgtttgagtttgattctgagca

SEQ ID NO: 10519 - DNA, 20 bp, Artificial Sequence
  Chr8_12 Reverse Primer
gcaatagctgtgccctcttc

SEQ ID NO: 10520 - DNA, 20 bp, Artificial Sequence
  Chr8_12 Reverse Primer
gggcactgcaagagaaaaag

SEQ ID NO: 10521 - DNA, 22 bp, Artificial Sequence
  Chr8_12 Reverse Primer
tgaaatttatggatgtttgtgg

SEQ ID NO: 10522 - DNA, 23 bp, Artificial Sequence
  Chr8_12 Reverse Primer
cagttcttctgtctctctgccat

SEQ ID NO: 10523 - DNA, 22 bp, Artificial Sequence
  Chr8_12 Reverse Primer
ccaacagtggacattttgattg

SEQ ID NO: 10524 - DNA, 26 bp, Artificial Sequence
  Chr8_12 Reverse Primer
tgctgatgttcctagtattatttcca

SEQ ID NO: 10525 - DNA, 20 bp, Artificial Sequence
  Chr8_12 Reverse Primer
aagcctttcatgcagttgct

SEQ ID NO: 10526 - DNA, 22 bp, Artificial Sequence
  Chr8_12 Reverse Primer
tgtgcctcatctgagtaatgct

SEQ ID NO: 10527 - DNA, 22 bp, Artificial Sequence
  Chr8_12 Reverse Primer
caccgtgttcaggaataatcaa

SEQ ID NO: 10528 - DNA, 22 bp, Artificial Sequence
  Chr8_12 Reverse Primer
tgggaagacttcagatggtttt

SEQ ID NO: 10529 - DNA, 21 bp, Artificial Sequence
  Chr8_12 Reverse Primer
ggttgcaacttcaatgctttt

SEQ ID NO: 10530 - DNA, 23 bp, Artificial Sequence
  Chr8_12 Reverse Primer
cccaaagcagaaatttattacca

SEQ ID NO: 10531 - DNA, 21 bp, Artificial Sequence
  Chr8_12 Reverse Primer
ttgtttgaaagaagggcagaa

SEQ ID NO: 10532 - DNA, 23 bp, Artificial Sequence
  Chr8_12 Reverse Primer
ttcatgagggaaagaaaaagatg

SEQ ID NO: 10533 - DNA, 22 bp, Artificial Sequence
  Chr8_12 Reverse Primer
tctcattgagcacactgctttt

SEQ ID NO: 10534 - DNA, 27 bp, Artificial Sequence
  Chr8_12 Reverse Primer
tcagcataacttattttacaagatcca

SEQ ID NO: 10535 - DNA, 23 bp, Artificial Sequence
  Chr8_12 Reverse Primer
tttttctgtgttcttgtttgcag

SEQ ID NO: 10536 - DNA, 20 bp, Artificial Sequence
  Chr8_12 Reverse Primer
aaatcaagtggaatggcagg

SEQ ID NO: 10537 - DNA, 20 bp, Artificial Sequence
  Chr8_12 Reverse Primer
caaccctgatcagcagaaga

SEQ ID NO: 10538 - DNA, 20 bp, Artificial Sequence
  Chr8_12 Reverse Primer
tggacagtggtgtccctaca

SEQ ID NO: 10539 - DNA, 20 bp, Artificial Sequence
  Chr8_12 Reverse Primer
tgagcctatgaccttgggat

SEQ ID NO: 10540 - DNA, 20 bp, Artificial Sequence
  Chr8_12 Reverse Primer
gatggaaagaagcacaggga

SEQ ID NO: 10541 - DNA, 20 bp, Artificial Sequence
  Chr8_12 Reverse Primer
cctgtcacccatcacagttg

SEQ ID NO: 10542 - DNA, 20 bp, Artificial Sequence
  Chr8_12 Reverse Primer
accaggcagcatgataggtt

SEQ ID NO: 10543 - DNA, 20 bp, Artificial Sequence
  Chr8_12 Reverse Primer
acccagaggacacaccagtc

SEQ ID NO: 10544 - DNA, 20 bp, Artificial Sequence
  Chr8_12 Reverse Primer
aaattccaacatgcagaggg

SEQ ID NO: 10545 - DNA, 20 bp, Artificial Sequence
  Chr8_12 Reverse Primer
caaaggggctcttttgaggt

SEQ ID NO: 10546 - DNA, 20 bp, Artificial Sequence
  Chr8_12 Reverse Primer
ctttctgctggatttcccaa

SEQ ID NO: 10547 - DNA, 21 bp, Artificial Sequence
  Chr8_12 Reverse Primer
tggcaacaatcataatgtcca

SEQ ID NO: 10548 - DNA, 20 bp, Artificial Sequence
  Chr8_12 Reverse Primer
ggcacatccaaacccaaata

SEQ ID NO: 10549 - DNA, 23 bp, Artificial Sequence
  Chr8_12 Reverse Primer
tttttcatttaaaacaaaggcca

SEQ ID NO: 10550 - DNA, 23 bp, Artificial Sequence
  Chr8_12 Reverse Primer
tttcttcattcatccaagtaggc

SEQ ID NO: 10551 - DNA, 20 bp, Artificial Sequence
  Chr8_12 Reverse Primer
accctgagtcagtgacaccc

SEQ ID NO: 10552 - DNA, 20 bp, Artificial Sequence
  Chr8_12 Reverse Primer
tgtctcatgcctctgttcca

SEQ ID NO: 10553 - DNA, 20 bp, Artificial Sequence
  Chr8_12 Reverse Primer
ttgcttcacaatccatctgc

SEQ ID NO: 10554 - DNA, 20 bp, Artificial Sequence
  Chr8_12 Reverse Primer
gccacattttctgttttccc

SEQ ID NO: 10555 - DNA, 22 bp, Artificial Sequence
  Chr8_12 Reverse Primer
aaaccacctctctgaggaaaaa

SEQ ID NO: 10556 - DNA, 22 bp, Artificial Sequence
  Chr8_12 Reverse Primer
ttccccttaatgaatgaagcat

SEQ ID NO: 10557 - DNA, 21 bp, Artificial Sequence
  Chr8_12 Reverse Primer
tgatttccctggtctaagcaa

SEQ ID NO: 10558 - DNA, 27 bp, Artificial Sequence
  Chr8_12 Reverse Primer
tgtttgttacaatagtacttaatgggg

SEQ ID NO: 10559 - DNA, 22 bp, Artificial Sequence
  Chr8_12 Reverse Primer
tgatcagctaggatttccatca

SEQ ID NO: 10560 - DNA, 21 bp, Artificial Sequence
  Chr8_12 Reverse Primer
tggtctgcttttgctcttttt

SEQ ID NO: 10561 - DNA, 20 bp, Artificial Sequence
  Chr8_12 Reverse Primer
attttgggcaacaaactgct

SEQ ID NO: 10562 - DNA, 25 bp, Artificial Sequence
  Chr8_12 Reverse Primer
tttataaattgtttttggcttgttt

SEQ ID NO: 10563 - DNA, 21 bp, Artificial Sequence
  Chr8_12 Reverse Primer
cgtgcctttctgagttctttg

SEQ ID NO: 10564 - DNA, 20 bp, Artificial Sequence
  Chr8_12 Reverse Primer
ctgattgcctctgggttcat

SEQ ID NO: 10565 - DNA, 20 bp, Artificial Sequence
  Chr8_12 Reverse Primer
acagcttagtccagcccaaa

SEQ ID NO: 10566 - DNA, 20 bp, Artificial Sequence
  Chr8_12 Reverse Primer
gctgcaattctttgcaactc

SEQ ID NO: 10567 - DNA, 23 bp, Artificial Sequence
  Chr8_12 Reverse Primer
cacatcctttaaatttttctggg

SEQ ID NO: 10568 - DNA, 27 bp, Artificial Sequence
  Chr8_12 Reverse Primer
gaaaagtgttttgttctttatctgaca

SEQ ID NO: 10569 - DNA, 21 bp, Artificial Sequence
  Chr8_12 Reverse Primer
ctccatgatggttgaggtcat

SEQ ID NO: 10570 - DNA, 24 bp, Artificial Sequence
  Chr8_12 Reverse Primer
aaacggatactatagaagttggga

SEQ ID NO: 10571 - DNA, 27 bp, Artificial Sequence
  Chr8_12 Reverse Primer
gggtttcactgtaatatatttatggct

SEQ ID NO: 10572 - DNA, 21 bp, Artificial Sequence
  Chr8_12 Reverse Primer
aacctgtctccttcttcagcc

SEQ ID NO: 10573 - DNA, 25 bp, Artificial Sequence
  Chr8_12 Reverse Primer
tcagtttagaaatatcagccatcaa

SEQ ID NO: 10574 - DNA, 21 bp, Artificial Sequence
  Chr8_12 Reverse Primer
ggcaagaagaacgacagtttc

SEQ ID NO: 10575 - DNA, 21 bp, Artificial Sequence
  Chr8_12 Reverse Primer
gaggcacattggtttaagcat

SEQ ID NO: 10576 - DNA, 21 bp, Artificial Sequence
  Chr8_12 Reverse Primer
gagtggcatcagagaaatcca

SEQ ID NO: 10577 - DNA, 20 bp, Artificial Sequence
  Chr8_13 Forward Primer
taacatcggagctttgctga

SEQ ID NO: 10578 - DNA, 20 bp, Artificial Sequence
  Chr8_13 Forward Primer
tcctggtgtgtgtgtgtgtg

SEQ ID NO: 10579 - DNA, 20 bp, Artificial Sequence
  Chr8_13 Forward Primer
gcacctgtaaaccttctcgg

SEQ ID NO: 10580 - DNA, 22 bp, Artificial Sequence
  Chr8_13 Forward Primer
tgagcactttcactgatctcaa

SEQ ID NO: 10581 - DNA, 20 bp, Artificial Sequence
  Chr8_13 Forward Primer
agccagaagatgccagtgtt

SEQ ID NO: 10582 - DNA, 20 bp, Artificial Sequence
  Chr8_13 Forward Primer
tccaagcccatctcttgttc

SEQ ID NO: 10583 - DNA, 24 bp, Artificial Sequence
  Chr8_13 Forward Primer
tgtcactcatttccaaattctcat

SEQ ID NO: 10584 - DNA, 20 bp, Artificial Sequence
  Chr8_13 Forward Primer
acaccaggcctcacagaaat

SEQ ID NO: 10585 - DNA, 20 bp, Artificial Sequence
  Chr8_13 Forward Primer
acttccgcttcttcttgctg

SEQ ID NO: 10586 - DNA, 20 bp, Artificial Sequence
  Chr8_13 Forward Primer
gtgcagacaggagctaaccc

SEQ ID NO: 10587 - DNA, 20 bp, Artificial Sequence
  Chr8_13 Forward Primer
tttccattttggcattgtcc

SEQ ID NO: 10588 - DNA, 20 bp, Artificial Sequence
  Chr8_13 Forward Primer
atgttccatctttgccttgc

SEQ ID NO: 10589 - DNA, 21 bp, Artificial Sequence
  Chr8_13 Forward Primer
caatcagataacccagggaca

SEQ ID NO: 10590 - DNA, 20 bp, Artificial Sequence
  Chr8_13 Forward Primer
tggcattccataaagaacca

SEQ ID NO: 10591 - DNA, 20 bp, Artificial Sequence
  Chr8_13 Forward Primer
atagatgtgggcagagggaa

SEQ ID NO: 10592 - DNA, 20 bp, Artificial Sequence
  Chr8_13 Forward Primer
cagtgattctgggctgttgg

SEQ ID NO: 10593 - DNA, 20 bp, Artificial Sequence
  Chr8_13 Forward Primer
atggcgatgattagcactga

SEQ ID NO: 10594 - DNA, 21 bp, Artificial Sequence
  Chr8_13 Forward Primer
tgaatccagaactcattgcct

SEQ ID NO: 10595 - DNA, 24 bp, Artificial Sequence
  Chr8_13 Forward Primer
aaatattctgccagcgtaaacttc

SEQ ID NO: 10596 - DNA, 20 bp, Artificial Sequence
  Chr8_13 Forward Primer
gcatggcatataaccaaccc

SEQ ID NO: 10597 - DNA, 20 bp, Artificial Sequence
  Chr8_13 Forward Primer
ggaggggtgtgtagtcctca

SEQ ID NO: 10598 - DNA, 20 bp, Artificial Sequence
  Chr8_13 Forward Primer
actgatggttttcccacagc

SEQ ID NO: 10599 - DNA, 20 bp, Artificial Sequence
  Chr8_13 Forward Primer
tggcagaagggagaacattt

SEQ ID NO: 10600 - DNA, 20 bp, Artificial Sequence
  Chr8_13 Forward Primer
aggatacctggcctgaccat

SEQ ID NO: 10601 - DNA, 20 bp, Artificial Sequence
  Chr8_13 Forward Primer
gtaaagggaagggaaaccca

SEQ ID NO: 10602 - DNA, 20 bp, Artificial Sequence
  Chr8_13 Forward Primer
tcatgctgtcagaacttggg

SEQ ID NO: 10603 - DNA, 20 bp, Artificial Sequence
  Chr8_13 Forward Primer
cacatacatgttcctccccc

SEQ ID NO: 10604 - DNA, 21 bp, Artificial Sequence
  Chr8_13 Forward Primer
tcaccaattgagagaagggaa

SEQ ID NO: 10605 - DNA, 21 bp, Artificial Sequence
  Chr8_13 Forward Primer
gaaaaacacgcacagtcaaaa

SEQ ID NO: 10606 - DNA, 20 bp, Artificial Sequence
  Chr8_13 Forward Primer
gccaagacatcaaaagccat

SEQ ID NO: 10607 - DNA, 21 bp, Artificial Sequence
  Chr8_13 Forward Primer
ttgctggaaaaactccaaaga

SEQ ID NO: 10608 - DNA, 20 bp, Artificial Sequence
  Chr8_13 Forward Primer
cacagcctcagacttcacca

SEQ ID NO: 10609 - DNA, 20 bp, Artificial Sequence
  Chr8_13 Forward Primer
accgtttcagaaggcaaaga

SEQ ID NO: 10610 - DNA, 20 bp, Artificial Sequence
  Chr8_13 Forward Primer
cagacaaagagggccaagag

SEQ ID NO: 10611 - DNA, 20 bp, Artificial Sequence
  Chr8_13 Forward Primer
cactgtagcaggtccaagca

SEQ ID NO: 10612 - DNA, 20 bp, Artificial Sequence
  Chr8_13 Forward Primer
tattcagatgtgtgggcagg

SEQ ID NO: 10613 - DNA, 20 bp, Artificial Sequence
  Chr8_13 Forward Primer
actctcctgggtctcgtcaa

SEQ ID NO: 10614 - DNA, 20 bp, Artificial Sequence
  Chr8_13 Forward Primer
ctttgcaaaagttgggtggt

SEQ ID NO: 10615 - DNA, 20 bp, Artificial Sequence
  Chr8_13 Forward Primer
atgtgcttggaaatgaaggg

SEQ ID NO: 10616 - DNA, 20 bp, Artificial Sequence
  Chr8_13 Forward Primer
tccccaaccaaagattctca

SEQ ID NO: 10617 - DNA, 27 bp, Artificial Sequence
  Chr8_13 Forward Primer
tttcagaacatctttgttaatcatcac

SEQ ID NO: 10618 - DNA, 20 bp, Artificial Sequence
  Chr8_13 Forward Primer
cgtccacacttttgggtctt

SEQ ID NO: 10619 - DNA, 20 bp, Artificial Sequence
  Chr8_13 Forward Primer
gatgagagctgcaggatggt

SEQ ID NO: 10620 - DNA, 20 bp, Artificial Sequence
  Chr8_13 Forward Primer
ctgagctctctcttgtggct

SEQ ID NO: 10621 - DNA, 24 bp, Artificial Sequence
  Chr8_13 Forward Primer
tcccctatggatatatggagagat

SEQ ID NO: 10622 - DNA, 20 bp, Artificial Sequence
  Chr8_13 Forward Primer
ccctctgtctcaacccgtaa

SEQ ID NO: 10623 - DNA, 20 bp, Artificial Sequence
  Chr8_13 Forward Primer
gagaaggaggacaggcagtg

SEQ ID NO: 10624 - DNA, 20 bp, Artificial Sequence
  Chr8_13 Forward Primer
tttccagttggaagggaaga

SEQ ID NO: 10625 - DNA, 21 bp, Artificial Sequence
  Chr8_13 Forward Primer
tcctagcttttgtggaagtcg

SEQ ID NO: 10626 - DNA, 20 bp, Artificial Sequence
  Chr8_13 Forward Primer
tccctatctgttaggcgtgg

SEQ ID NO: 10627 - DNA, 20 bp, Artificial Sequence
  Chr8_13 Forward Primer
cttctttgggctctctggtg

SEQ ID NO: 10628 - DNA, 20 bp, Artificial Sequence
  Chr8_13 Forward Primer
agatgtcacatggcttgcac

SEQ ID NO: 10629 - DNA, 20 bp, Artificial Sequence
  Chr8_13 Forward Primer
attttggttccagctttccc

SEQ ID NO: 10630 - DNA, 20 bp, Artificial Sequence
  Chr8_13 Forward Primer
cacgaaaatggactgagcaa

SEQ ID NO: 10631 - DNA, 20 bp, Artificial Sequence
  Chr8_13 Forward Primer
tgataaatccaccagtgcca

SEQ ID NO: 10632 - DNA, 20 bp, Artificial Sequence
  Chr8_13 Forward Primer
caccgtattctctgccccta

SEQ ID NO: 10633 - DNA, 20 bp, Artificial Sequence
  Chr8_13 Forward Primer
ccaccctgaaacagcatctt

SEQ ID NO: 10634 - DNA, 24 bp, Artificial Sequence
  Chr8_13 Forward Primer
gaaaaatgatggagagagaagaaa

SEQ ID NO: 10635 - DNA, 20 bp, Artificial Sequence
  Chr8_13 Forward Primer
gagaatcccagtgaaggagc

SEQ ID NO: 10636 - DNA, 20 bp, Artificial Sequence
  Chr8_13 Forward Primer
acatccaggatttccacagc

SEQ ID NO: 10637 - DNA, 20 bp, Artificial Sequence
  Chr8_13 Forward Primer
ggttgctgcaaatccatctt

SEQ ID NO: 10638 - DNA, 20 bp, Artificial Sequence
  Chr8_13 Forward Primer
catcagcaccataatcccct

SEQ ID NO: 10639 - DNA, 21 bp, Artificial Sequence
  Chr8_13 Forward Primer
tgcttctcttctgattgcctt

SEQ ID NO: 10640 - DNA, 20 bp, Artificial Sequence
  Chr8_13 Forward Primer
tggaattaaccattcgcctc

SEQ ID NO: 10641 - DNA, 23 bp, Artificial Sequence
  Chr8_13 Forward Primer
tgctaaacaattctaagccctga

SEQ ID NO: 10642 - DNA, 20 bp, Artificial Sequence
  Chr8_13 Forward Primer
caccaccaaaatgggaaatc

SEQ ID NO: 10643 - DNA, 21 bp, Artificial Sequence
  Chr8_13 Forward Primer
tggtcaacaagaccacaactt

SEQ ID NO: 10644 - DNA, 23 bp, Artificial Sequence
  Chr8_13 Forward Primer
tgcttcaagatcaatgttaccaa

SEQ ID NO: 10645 - DNA, 20 bp, Artificial Sequence
  Chr8_13 Forward Primer
ttggggaagacataatggga

SEQ ID NO: 10646 - DNA, 22 bp, Artificial Sequence
  Chr8_13 Forward Primer
tctgaaacctgtcagcatcagt

SEQ ID NO: 10647 - DNA, 20 bp, Artificial Sequence
  Chr8_13 Forward Primer
tatgtctggaccaaccctcc

SEQ ID NO: 10648 - DNA, 21 bp, Artificial Sequence
  Chr8_13 Forward Primer
gaaaatgaggaaatgagggga

SEQ ID NO: 10649 - DNA, 20 bp, Artificial Sequence
  Chr8_13 Forward Primer
agtgacagctggggagagaa

SEQ ID NO: 10650 - DNA, 24 bp, Artificial Sequence
  Chr8_13 Forward Primer
tgaaaacaaaacaaaacctttgaa

SEQ ID NO: 10651 - DNA, 20 bp, Artificial Sequence
  Chr8_13 Forward Primer
ccatgggaatccctaaacaa

SEQ ID NO: 10652 - DNA, 20 bp, Artificial Sequence
  Chr8_13 Forward Primer
ctctctttgcccttcccttt

SEQ ID NO: 10653 - DNA, 21 bp, Artificial Sequence
  Chr8_13 Forward Primer
ttaaggcaaacagtgtcgatg

SEQ ID NO: 10654 - DNA, 20 bp, Artificial Sequence
  Chr8_13 Forward Primer
acccctgcccttgagatact

SEQ ID NO: 10655 - DNA, 20 bp, Artificial Sequence
  Chr8_13 Forward Primer
gccacttggttggtgaaagt

SEQ ID NO: 10656 - DNA, 20 bp, Artificial Sequence
  Chr8_13 Forward Primer
ccactttctgtgaggggtgt

SEQ ID NO: 10657 - DNA, 20 bp, Artificial Sequence
  Chr8_13 Forward Primer
aagaggcctcaggatgtcaa

SEQ ID NO: 10658 - DNA, 20 bp, Artificial Sequence
  Chr8_13 Forward Primer
gccatagacttcaactgccc

SEQ ID NO: 10659 - DNA, 20 bp, Artificial Sequence
  Chr8_13 Forward Primer
ccatcaggatgaagctaggc

SEQ ID NO: 10660 - DNA, 20 bp, Artificial Sequence
  Chr8_13 Forward Primer
cctcagggaggacagggtat

SEQ ID NO: 10661 - DNA, 20 bp, Artificial Sequence
  Chr8_13 Forward Primer
gaataaatggccggtgctac

SEQ ID NO: 10662 - DNA, 20 bp, Artificial Sequence
  Chr8_13 Forward Primer
tggcaggcacatgacatatt

SEQ ID NO: 10663 - DNA, 20 bp, Artificial Sequence
  Chr8_13 Forward Primer
ttctggagcaatgtgtgcat

SEQ ID NO: 10664 - DNA, 20 bp, Artificial Sequence
  Chr8_13 Forward Primer
ccacgcatggttgatattga

SEQ ID NO: 10665 - DNA, 21 bp, Artificial Sequence
  Chr8_13 Forward Primer
gcatggattcttgcataaaaa

SEQ ID NO: 10666 - DNA, 20 bp, Artificial Sequence
  Chr8_13 Forward Primer
actttgcctcagatgggaac

SEQ ID NO: 10667 - DNA, 23 bp, Artificial Sequence
  Chr8_13 Forward Primer
aagttccttgaaatcataccctg

SEQ ID NO: 10668 - DNA, 20 bp, Artificial Sequence
  Chr8_13 Forward Primer
ctgtgtctcctgaactggca

SEQ ID NO: 10669 - DNA, 20 bp, Artificial Sequence
  Chr8_13 Forward Primer
atatagcatggcaaagggca

SEQ ID NO: 10670 - DNA, 20 bp, Artificial Sequence
  Chr8_13 Forward Primer
tcccgcagaaacaaatagga

SEQ ID NO: 10671 - DNA, 23 bp, Artificial Sequence
  Chr8_13 Forward Primer
tagggaaaaacaagaagatcagc

SEQ ID NO: 10672 - DNA, 20 bp, Artificial Sequence
  Chr8_13 Forward Primer
tctcctgggacacttggact

SEQ ID NO: 10673 - DNA, 20 bp, Artificial Sequence
  Chr8_13 Reverse Primer
ttgcattgtgaggggtaaca

SEQ ID NO: 10674 - DNA, 20 bp, Artificial Sequence
  Chr8_13 Reverse Primer
agcacttatcgagagcccac

SEQ ID NO: 10675 - DNA, 20 bp, Artificial Sequence
  Chr8_13 Reverse Primer
cccctacacagtggaaagga

SEQ ID NO: 10676 - DNA, 22 bp, Artificial Sequence
  Chr8_13 Reverse Primer
ggtggggatacatagaaacagg

SEQ ID NO: 10677 - DNA, 21 bp, Artificial Sequence
  Chr8_13 Reverse Primer
gggtattctatgattcgtggg

SEQ ID NO: 10678 - DNA, 20 bp, Artificial Sequence
  Chr8_13 Reverse Primer
tagcagagtaacagccaccg

SEQ ID NO: 10679 - DNA, 23 bp, Artificial Sequence
  Chr8_13 Reverse Primer
tgctgagtagaacagtctccaag

SEQ ID NO: 10680 - DNA, 20 bp, Artificial Sequence
  Chr8_13 Reverse Primer
tgcataaatcctcaaaggca

SEQ ID NO: 10681 - DNA, 24 bp, Artificial Sequence
  Chr8_13 Reverse Primer
ataatcatacacacacacacacga

SEQ ID NO: 10682 - DNA, 20 bp, Artificial Sequence
  Chr8_13 Reverse Primer
tcccaggaccaaatgactgt

SEQ ID NO: 10683 - DNA, 20 bp, Artificial Sequence
  Chr8_13 Reverse Primer
attggaggagggcttttgat

SEQ ID NO: 10684 - DNA, 20 bp, Artificial Sequence
  Chr8_13 Reverse Primer
gcaaattgtctggggtgaaa

SEQ ID NO: 10685 - DNA, 20 bp, Artificial Sequence
  Chr8_13 Reverse Primer
gggtgaaaggaaggagaagg

SEQ ID NO: 10686 - DNA, 20 bp, Artificial Sequence
  Chr8_13 Reverse Primer
ctggttttgcttctgcatca

SEQ ID NO: 10687 - DNA, 20 bp, Artificial Sequence
  Chr8_13 Reverse Primer
atttaggttgtgtggcccag

SEQ ID NO: 10688 - DNA, 20 bp, Artificial Sequence
  Chr8_13 Reverse Primer
caggtttctgtcctctgcct

SEQ ID NO: 10689 - DNA, 20 bp, Artificial Sequence
  Chr8_13 Reverse Primer
tgcaactgaggttttccctt

SEQ ID NO: 10690 - DNA, 21 bp, Artificial Sequence
  Chr8_13 Reverse Primer
gattgttaccttgaattggca

SEQ ID NO: 10691 - DNA, 27 bp, Artificial Sequence
  Chr8_13 Reverse Primer
tttaactcaaactatctgaagagacct

SEQ ID NO: 10692 - DNA, 20 bp, Artificial Sequence
  Chr8_13 Reverse Primer
gctttgatcagtaggctggc

SEQ ID NO: 10693 - DNA, 20 bp, Artificial Sequence
  Chr8_13 Reverse Primer
tgggctccttctgaaaaatg

SEQ ID NO: 10694 - DNA, 20 bp, Artificial Sequence
  Chr8_13 Reverse Primer
gccacattcagctgagcata

SEQ ID NO: 10695 - DNA, 22 bp, Artificial Sequence
  Chr8_13 Reverse Primer
tgctcacctacagtgtttttgg

SEQ ID NO: 10696 - DNA, 20 bp, Artificial Sequence
  Chr8_13 Reverse Primer
catcgcaggctatttcaaca

SEQ ID NO: 10697 - DNA, 20 bp, Artificial Sequence
  Chr8_13 Reverse Primer
ctgagatgtttttgtgcccc

SEQ ID NO: 10698 - DNA, 20 bp, Artificial Sequence
  Chr8_13 Reverse Primer
tgctttgggttgacatcaga

SEQ ID NO: 10699 - DNA, 20 bp, Artificial Sequence
  Chr8_13 Reverse Primer
tgcctagttctctccctcca

SEQ ID NO: 10700 - DNA, 20 bp, Artificial Sequence
  Chr8_13 Reverse Primer
tgaccctaacggtccttctg

SEQ ID NO: 10701 - DNA, 27 bp, Artificial Sequence
  Chr8_13 Reverse Primer
tggtgcttgtactacttctttataacc

SEQ ID NO: 10702 - DNA, 20 bp, Artificial Sequence
  Chr8_13 Reverse Primer
ggatgttgcttctccacagg

SEQ ID NO: 10703 - DNA, 20 bp, Artificial Sequence
  Chr8_13 Reverse Primer
atagcatgtgccaggatggt

SEQ ID NO: 10704 - DNA, 21 bp, Artificial Sequence
  Chr8_13 Reverse Primer
agaagcgcagtgaagtgattc

SEQ ID NO: 10705 - DNA, 24 bp, Artificial Sequence
  Chr8_13 Reverse Primer
gacatcctaaaacattcacttccc

SEQ ID NO: 10706 - DNA, 20 bp, Artificial Sequence
  Chr8_13 Reverse Primer
aactagggctctagggcagg

SEQ ID NO: 10707 - DNA, 20 bp, Artificial Sequence
  Chr8_13 Reverse Primer
gcattgtgaagagtggcaaa

SEQ ID NO: 10708 - DNA, 20 bp, Artificial Sequence
  Chr8_13 Reverse Primer
tgctggaaatcccagaagtc

SEQ ID NO: 10709 - DNA, 20 bp, Artificial Sequence
  Chr8_13 Reverse Primer
attttgctgagaggtgctgg

SEQ ID NO: 10710 - DNA, 20 bp, Artificial Sequence
  Chr8_13 Reverse Primer
caatgctttgtaagccctcc

SEQ ID NO: 10711 - DNA, 20 bp, Artificial Sequence
  Chr8_13 Reverse Primer
ggaaggctctctaaatgccc

SEQ ID NO: 10712 - DNA, 25 bp, Artificial Sequence
  Chr8_13 Reverse Primer
aaaataaaataaacctgatttgcac

SEQ ID NO: 10713 - DNA, 27 bp, Artificial Sequence
  Chr8_13 Reverse Primer
aaacccttataacttttattatcacca

SEQ ID NO: 10714 - DNA, 20 bp, Artificial Sequence
  Chr8_13 Reverse Primer
cctgggacaaaatcacaacc

SEQ ID NO: 10715 - DNA, 20 bp, Artificial Sequence
  Chr8_13 Reverse Primer
aggcctctttgaaaaggtga

SEQ ID NO: 10716 - DNA, 20 bp, Artificial Sequence
  Chr8_13 Reverse Primer
tggcatgttcaatgacaaca

SEQ ID NO: 10717 - DNA, 20 bp, Artificial Sequence
  Chr8_13 Reverse Primer
ctggccctgcctataaatca

SEQ ID NO: 10718 - DNA, 20 bp, Artificial Sequence
  Chr8_13 Reverse Primer
tacattgggagggtttgtgc

SEQ ID NO: 10719 - DNA, 21 bp, Artificial Sequence
  Chr8_13 Reverse Primer
agcatgggacagtagaggatg

SEQ ID NO: 10720 - DNA, 21 bp, Artificial Sequence
  Chr8_13 Reverse Primer
tcctaagagaggggatttgga

SEQ ID NO: 10721 - DNA, 20 bp, Artificial Sequence
  Chr8_13 Reverse Primer
catggttggaacagggagat

SEQ ID NO: 10722 - DNA, 20 bp, Artificial Sequence
  Chr8_13 Reverse Primer
cttccctggggacttgtttt

SEQ ID NO: 10723 - DNA, 20 bp, Artificial Sequence
  Chr8_13 Reverse Primer
ttccatggacatctttgggt

SEQ ID NO: 10724 - DNA, 21 bp, Artificial Sequence
  Chr8_13 Reverse Primer
tgctaagcatgccctgatact

SEQ ID NO: 10725 - DNA, 20 bp, Artificial Sequence
  Chr8_13 Reverse Primer
aagccaaaggtattttgggg

SEQ ID NO: 10726 - DNA, 20 bp, Artificial Sequence
  Chr8_13 Reverse Primer
agcagaacatgctcccaaat

SEQ ID NO: 10727 - DNA, 22 bp, Artificial Sequence
  Chr8_13 Reverse Primer
ctttgggggtcattattctgtc

SEQ ID NO: 10728 - DNA, 23 bp, Artificial Sequence
  Chr8_13 Reverse Primer
tcagattccttatctccatttcc

SEQ ID NO: 10729 - DNA, 22 bp, Artificial Sequence
  Chr8_13 Reverse Primer
cccaatctaaacaacctgatcc

SEQ ID NO: 10730 - DNA, 20 bp, Artificial Sequence
  Chr8_13 Reverse Primer
ttctcagccaatcgtctcaa

SEQ ID NO: 10731 - DNA, 20 bp, Artificial Sequence
  Chr8_13 Reverse Primer
agatcagaggccgattgaga

SEQ ID NO: 10732 - DNA, 20 bp, Artificial Sequence
  Chr8_13 Reverse Primer
cagagaacatggggaaagga

SEQ ID NO: 10733 - DNA, 20 bp, Artificial Sequence
  Chr8_13 Reverse Primer
ccatttgccaacaacttgaa

SEQ ID NO: 10734 - DNA, 20 bp, Artificial Sequence
  Chr8_13 Reverse Primer
cttcaacccatgaccactcc

SEQ ID NO: 10735 - DNA, 25 bp, Artificial Sequence
  Chr8_13 Reverse Primer
tttaaagtttctccacttctttcaa

SEQ ID NO: 10736 - DNA, 20 bp, Artificial Sequence
  Chr8_13 Reverse Primer
gtctgttgagagtccccagg

SEQ ID NO: 10737 - DNA, 21 bp, Artificial Sequence
  Chr8_13 Reverse Primer
gaagaccttgagcaagcagtg

SEQ ID NO: 10738 - DNA, 20 bp, Artificial Sequence
  Chr8_13 Reverse Primer
ccatccttgtttctccatca

SEQ ID NO: 10739 - DNA, 20 bp, Artificial Sequence
  Chr8_13 Reverse Primer
taggcaaacaaggaacaccc

SEQ ID NO: 10740 - DNA, 23 bp, Artificial Sequence
  Chr8_13 Reverse Primer
tcaaaactatttgagaatcctgc

SEQ ID NO: 10741 - DNA, 21 bp, Artificial Sequence
  Chr8_13 Reverse Primer
tgggatgttctcaaagagcag

SEQ ID NO: 10742 - DNA, 24 bp, Artificial Sequence
  Chr8_13 Reverse Primer
aaaaagggaagggaactctatctc

SEQ ID NO: 10743 - DNA, 20 bp, Artificial Sequence
  Chr8_13 Reverse Primer
caagtgtttgcaaccctgat

SEQ ID NO: 10744 - DNA, 20 bp, Artificial Sequence
  Chr8_13 Reverse Primer
tatacagaccacccggaagc

SEQ ID NO: 10745 - DNA, 20 bp, Artificial Sequence
  Chr8_13 Reverse Primer
tatggcctgcttgtgtctca

SEQ ID NO: 10746 - DNA, 20 bp, Artificial Sequence
  Chr8_13 Reverse Primer
ttccccctctagtgacgatg

SEQ ID NO: 10747 - DNA, 20 bp, Artificial Sequence
  Chr8_13 Reverse Primer
agtgtgtgaacagagctgcg

SEQ ID NO: 10748 - DNA, 20 bp, Artificial Sequence
  Chr8_13 Reverse Primer
attccagccacctcaaacat

SEQ ID NO: 10749 - DNA, 20 bp, Artificial Sequence
  Chr8_13 Reverse Primer
tgatgcatacacccaaggaa

SEQ ID NO: 10750 - DNA, 20 bp, Artificial Sequence
  Chr8_13 Reverse Primer
catgtctaaagccctgctcc

SEQ ID NO: 10751 - DNA, 23 bp, Artificial Sequence
  Chr8_13 Reverse Primer
tccagatttactgttccatgaca

SEQ ID NO: 10752 - DNA, 20 bp, Artificial Sequence
  Chr8_13 Reverse Primer
caggggctgaatgataatgg

SEQ ID NO: 10753 - DNA, 20 bp, Artificial Sequence
  Chr8_13 Reverse Primer
ctcaaaccagcagccttagc

SEQ ID NO: 10754 - DNA, 20 bp, Artificial Sequence
  Chr8_13 Reverse Primer
gatttggccagaaaaatgct

SEQ ID NO: 10755 - DNA, 20 bp, Artificial Sequence
  Chr8_13 Reverse Primer
tttcatgcaggagcttgttg

SEQ ID NO: 10756 - DNA, 21 bp, Artificial Sequence
  Chr8_13 Reverse Primer
tttccagatcttcctacgaca

SEQ ID NO: 10757 - DNA, 20 bp, Artificial Sequence
  Chr8_13 Reverse Primer
accaaggagtctagtgccca

SEQ ID NO: 10758 - DNA, 20 bp, Artificial Sequence
  Chr8_13 Reverse Primer
gcattaaacaatggatgccc

SEQ ID NO: 10759 - DNA, 22 bp, Artificial Sequence
  Chr8_13 Reverse Primer
catttcccatttaggaaacatc

SEQ ID NO: 10760 - DNA, 20 bp, Artificial Sequence
  Chr8_13 Reverse Primer
ccgacacccctcatttttat

SEQ ID NO: 10761 - DNA, 20 bp, Artificial Sequence
  Chr8_13 Reverse Primer
acacccaacatggaatgagc

SEQ ID NO: 10762 - DNA, 20 bp, Artificial Sequence
  Chr8_13 Reverse Primer
caaagtcatccccaggaaaa

SEQ ID NO: 10763 - DNA, 21 bp, Artificial Sequence
  Chr8_13 Reverse Primer
cactgaaactgagagcaggtg

SEQ ID NO: 10764 - DNA, 20 bp, Artificial Sequence
  Chr8_13 Reverse Primer
aagcaggcaaaatgctctgt

SEQ ID NO: 10765 - DNA, 20 bp, Artificial Sequence
  Chr8_13 Reverse Primer
caactcacaagagcctgctg

SEQ ID NO: 10766 - DNA, 22 bp, Artificial Sequence
  Chr8_13 Reverse Primer
tcagcgtcaaagtctttcttga

SEQ ID NO: 10767 - DNA, 24 bp, Artificial Sequence
  Chr8_13 Reverse Primer
acactgtttcaaaacacagctttc

SEQ ID NO: 10768 - DNA, 20 bp, Artificial Sequence
  Chr8_13 Reverse Primer
cagtttcaattgtgttgcgg

SEQ ID NO: 10769 - DNA, 20 bp, Artificial Sequence
  Chr8_14 Forward Primer
ttctgtcacaggcagcaagt

SEQ ID NO: 10770 - DNA, 20 bp, Artificial Sequence
  Chr8_14 Forward Primer
ccacacacaatcggaatgac

SEQ ID NO: 10771 - DNA, 20 bp, Artificial Sequence
  Chr8_14 Forward Primer
ttgccacatatgagcgtgtt

SEQ ID NO: 10772 - DNA, 20 bp, Artificial Sequence
  Chr8_14 Forward Primer
tttgaaaaaggagctgccac

SEQ ID NO: 10773 - DNA, 20 bp, Artificial Sequence
  Chr8_14 Forward Primer
acagggcaaagaggtgattg

SEQ ID NO: 10774 - DNA, 20 bp, Artificial Sequence
  Chr8_14 Forward Primer
ttgcgtgacatcatcagaca

SEQ ID NO: 10775 - DNA, 20 bp, Artificial Sequence
  Chr8_14 Forward Primer
gggctccaggttgtgactat

SEQ ID NO: 10776 - DNA, 20 bp, Artificial Sequence
  Chr8_14 Forward Primer
aatttgcaactgatggtgcc

SEQ ID NO: 10777 - DNA, 20 bp, Artificial Sequence
  Chr8_14 Forward Primer
aggctgagtggcttgaagaa

SEQ ID NO: 10778 - DNA, 20 bp, Artificial Sequence
  Chr8_14 Forward Primer
tctagagggcagctttggaa

SEQ ID NO: 10779 - DNA, 20 bp, Artificial Sequence
  Chr8_14 Forward Primer
ggacagaccctgctctcaaa

SEQ ID NO: 10780 - DNA, 20 bp, Artificial Sequence
  Chr8_14 Forward Primer
gtcagcccctgagaacaagt

SEQ ID NO: 10781 - DNA, 20 bp, Artificial Sequence
  Chr8_14 Forward Primer
aattgcagatcaatcccagg

SEQ ID NO: 10782 - DNA, 20 bp, Artificial Sequence
  Chr8_14 Forward Primer
ccaggcaaggaaggtaaaca

SEQ ID NO: 10783 - DNA, 20 bp, Artificial Sequence
  Chr8_14 Forward Primer
ccccagcaatggaagactaa

SEQ ID NO: 10784 - DNA, 20 bp, Artificial Sequence
  Chr8_14 Forward Primer
agccccaacattgaagaggt

SEQ ID NO: 10785 - DNA, 20 bp, Artificial Sequence
  Chr8_14 Forward Primer
gaagctgaagccaaagttgc

SEQ ID NO: 10786 - DNA, 20 bp, Artificial Sequence
  Chr8_14 Forward Primer
catgaccgtttttgggactt

SEQ ID NO: 10787 - DNA, 20 bp, Artificial Sequence
  Chr8_14 Forward Primer
tgagtagatgggcctgatcc

SEQ ID NO: 10788 - DNA, 20 bp, Artificial Sequence
  Chr8_14 Forward Primer
taggggaaggaaggaaatgg

SEQ ID NO: 10789 - DNA, 20 bp, Artificial Sequence
  Chr8_14 Forward Primer
agtgactttgagccttgcct

SEQ ID NO: 10790 - DNA, 20 bp, Artificial Sequence
  Chr8_14 Forward Primer
tccttttgcacgctcttctt

SEQ ID NO: 10791 - DNA, 20 bp, Artificial Sequence
  Chr8_14 Forward Primer
aaatccatccaagcatcagc

SEQ ID NO: 10792 - DNA, 20 bp, Artificial Sequence
  Chr8_14 Forward Primer
tcgcctgaaatacaaggagg

SEQ ID NO: 10793 - DNA, 20 bp, Artificial Sequence
  Chr8_14 Forward Primer
aatcttgtgcattcagcgtg

SEQ ID NO: 10794 - DNA, 20 bp, Artificial Sequence
  Chr8_14 Forward Primer
tccctaatttgggggaagtt

SEQ ID NO: 10795 - DNA, 20 bp, Artificial Sequence
  Chr8_14 Forward Primer
ggaatgtctggcatctccat

SEQ ID NO: 10796 - DNA, 20 bp, Artificial Sequence
  Chr8_14 Forward Primer
ccacaaaaatcctgggaaga

SEQ ID NO: 10797 - DNA, 20 bp, Artificial Sequence
  Chr8_14 Forward Primer
tggtgctgagaggaaaggtt

SEQ ID NO: 10798 - DNA, 20 bp, Artificial Sequence
  Chr8_14 Forward Primer
gtcctcccaatcttcccagt

SEQ ID NO: 10799 - DNA, 20 bp, Artificial Sequence
  Chr8_14 Forward Primer
tccatttctcggtgttcaga

SEQ ID NO: 10800 - DNA, 22 bp, Artificial Sequence
  Chr8_14 Forward Primer
tcacaggattccctttatttga

SEQ ID NO: 10801 - DNA, 20 bp, Artificial Sequence
  Chr8_14 Forward Primer
ctgacagcatgaccttgagc

SEQ ID NO: 10802 - DNA, 21 bp, Artificial Sequence
  Chr8_14 Forward Primer
ggtggataaatcgaattggtg

SEQ ID NO: 10803 - DNA, 20 bp, Artificial Sequence
  Chr8_14 Forward Primer
tctttgttgggtgggaagtc

SEQ ID NO: 10804 - DNA, 20 bp, Artificial Sequence
  Chr8_14 Forward Primer
agtgaaacagctgccaaggt

SEQ ID NO: 10805 - DNA, 20 bp, Artificial Sequence
  Chr8_14 Forward Primer
tccctttggcttcttcgtta

SEQ ID NO: 10806 - DNA, 23 bp, Artificial Sequence
  Chr8_14 Forward Primer
tctgaaatgaaaatgaaggatga

SEQ ID NO: 10807 - DNA, 20 bp, Artificial Sequence
  Chr8_14 Forward Primer
gcatttttctacaggccgag

SEQ ID NO: 10808 - DNA, 20 bp, Artificial Sequence
  Chr8_14 Forward Primer
gcaggtgaaaagacccagaa

SEQ ID NO: 10809 - DNA, 20 bp, Artificial Sequence
  Chr8_14 Forward Primer
tgcgcgatctaggaaagact

SEQ ID NO: 10810 - DNA, 23 bp, Artificial Sequence
  Chr8_14 Forward Primer
tttttaatcttctcccatctggt

SEQ ID NO: 10811 - DNA, 20 bp, Artificial Sequence
  Chr8_14 Forward Primer
gaaaaagaaggaggaagggg

SEQ ID NO: 10812 - DNA, 21 bp, Artificial Sequence
  Chr8_14 Forward Primer
tgaaggttcatggtgactgtg

SEQ ID NO: 10813 - DNA, 20 bp, Artificial Sequence
  Chr8_14 Forward Primer
gacaggatcccacattgacc

SEQ ID NO: 10814 - DNA, 20 bp, Artificial Sequence
  Chr8_14 Forward Primer
acccccaaagtcactctcct

SEQ ID NO: 10815 - DNA, 21 bp, Artificial Sequence
  Chr8_14 Forward Primer
gcatctacatcaaaatgccct

SEQ ID NO: 10816 - DNA, 20 bp, Artificial Sequence
  Chr8_14 Forward Primer
gagaactgagggtttgtggc

SEQ ID NO: 10817 - DNA, 20 bp, Artificial Sequence
  Chr8_14 Forward Primer
tgcattccgctaacactcaa

SEQ ID NO: 10818 - DNA, 20 bp, Artificial Sequence
  Chr8_14 Forward Primer
cagcatactgtaggtggcga

SEQ ID NO: 10819 - DNA, 20 bp, Artificial Sequence
  Chr8_14 Forward Primer
gaggccaggctcaagtgtag

SEQ ID NO: 10820 - DNA, 20 bp, Artificial Sequence
  Chr8_14 Forward Primer
gttccgggaagactttggtg

SEQ ID NO: 10821 - DNA, 20 bp, Artificial Sequence
  Chr8_14 Forward Primer
gtgtagagttcctcgctgcc

SEQ ID NO: 10822 - DNA, 20 bp, Artificial Sequence
  Chr8_14 Forward Primer
tcaggctccttggttgattc

SEQ ID NO: 10823 - DNA, 20 bp, Artificial Sequence
  Chr8_14 Forward Primer
tctttcctagttcgggagca

SEQ ID NO: 10824 - DNA, 20 bp, Artificial Sequence
  Chr8_14 Forward Primer
gagctccgagaacgaagaga

SEQ ID NO: 10825 - DNA, 20 bp, Artificial Sequence
  Chr8_14 Forward Primer
acacccgcggtgacttaaac

SEQ ID NO: 10826 - DNA, 20 bp, Artificial Sequence
  Chr8_14 Forward Primer
ggttcctccgctgttctttt

SEQ ID NO: 10827 - DNA, 20 bp, Artificial Sequence
  Chr8_14 Forward Primer
cctgcctcgcacactaagtt

SEQ ID NO: 10828 - DNA, 20 bp, Artificial Sequence
  Chr8_14 Forward Primer
cacctcctccaccaagactg

SEQ ID NO: 10829 - DNA, 20 bp, Artificial Sequence
  Chr8_14 Forward Primer
gttatttctgtcggccgtgt

SEQ ID NO: 10830 - DNA, 20 bp, Artificial Sequence
  Chr8_14 Forward Primer
cccaagaaagccaaaatgaa

SEQ ID NO: 10831 - DNA, 20 bp, Artificial Sequence
  Chr8_14 Forward Primer
cagcctcaccctactggaac

SEQ ID NO: 10832 - DNA, 21 bp, Artificial Sequence
  Chr8_14 Forward Primer
cccaggatgatttattcagca

SEQ ID NO: 10833 - DNA, 21 bp, Artificial Sequence
  Chr8_14 Forward Primer
ttgcacacaacttcctcctct

SEQ ID NO: 10834 - DNA, 21 bp, Artificial Sequence
  Chr8_14 Forward Primer
ccatatcccccaacttctagc

SEQ ID NO: 10835 - DNA, 20 bp, Artificial Sequence
  Chr8_14 Forward Primer
ttgcaggaatctgacatcca

SEQ ID NO: 10836 - DNA, 20 bp, Artificial Sequence
  Chr8_14 Forward Primer
ccattggccacatttacagt

SEQ ID NO: 10837 - DNA, 20 bp, Artificial Sequence
  Chr8_14 Forward Primer
aagggaaggagggtgtttgt

SEQ ID NO: 10838 - DNA, 23 bp, Artificial Sequence
  Chr8_14 Forward Primer
tgaaaagcagtaatgaaagcaaa

SEQ ID NO: 10839 - DNA, 20 bp, Artificial Sequence
  Chr8_14 Forward Primer
actgttttctccatgtgggc

SEQ ID NO: 10840 - DNA, 20 bp, Artificial Sequence
  Chr8_14 Forward Primer
atgcagtgccagatgtgtgt

SEQ ID NO: 10841 - DNA, 20 bp, Artificial Sequence
  Chr8_14 Forward Primer
cccaccagttgcagagaact

SEQ ID NO: 10842 - DNA, 20 bp, Artificial Sequence
  Chr8_14 Forward Primer
ggaatggaaaaaggggcata

SEQ ID NO: 10843 - DNA, 20 bp, Artificial Sequence
  Chr8_14 Forward Primer
aaaacaaatcctttccccct

SEQ ID NO: 10844 - DNA, 20 bp, Artificial Sequence
  Chr8_14 Forward Primer
cacacgtgggaaacattcag

SEQ ID NO: 10845 - DNA, 20 bp, Artificial Sequence
  Chr8_14 Forward Primer
tcccaccaatttccaagtgt

SEQ ID NO: 10846 - DNA, 20 bp, Artificial Sequence
  Chr8_14 Forward Primer
tcctttgcctggagtctttg

SEQ ID NO: 10847 - DNA, 20 bp, Artificial Sequence
  Chr8_14 Forward Primer
ttccccctgaatacctcctt

SEQ ID NO: 10848 - DNA, 20 bp, Artificial Sequence
  Chr8_14 Forward Primer
tcacctcccctttgtttgtc

SEQ ID NO: 10849 - DNA, 21 bp, Artificial Sequence
  Chr8_14 Forward Primer
cagccaccatgttggatattt

SEQ ID NO: 10850 - DNA, 20 bp, Artificial Sequence
  Chr8_14 Forward Primer
gtttacgtgcacatggatgc

SEQ ID NO: 10851 - DNA, 20 bp, Artificial Sequence
  Chr8_14 Forward Primer
tgcttggtaacagcagaagc

SEQ ID NO: 10852 - DNA, 21 bp, Artificial Sequence
  Chr8_14 Forward Primer
tgcatttggatgtatctggtg

SEQ ID NO: 10853 - DNA, 20 bp, Artificial Sequence
  Chr8_14 Forward Primer
gtcaggaaggaagggatgag

SEQ ID NO: 10854 - DNA, 22 bp, Artificial Sequence
  Chr8_14 Forward Primer
tgaaacttttcaaagtgagcca

SEQ ID NO: 10855 - DNA, 20 bp, Artificial Sequence
  Chr8_14 Forward Primer
aaggagagaggaaggggatg

SEQ ID NO: 10856 - DNA, 21 bp, Artificial Sequence
  Chr8_14 Forward Primer
tgattcaagaatgggatccag

SEQ ID NO: 10857 - DNA, 20 bp, Artificial Sequence
  Chr8_14 Forward Primer
ccaggaaggttgccaataaa

SEQ ID NO: 10858 - DNA, 20 bp, Artificial Sequence
  Chr8_14 Forward Primer
caggccctcaaattgacaaa

SEQ ID NO: 10859 - DNA, 24 bp, Artificial Sequence
  Chr8_14 Forward Primer
ttcaaagtgataaaacattgcttc

SEQ ID NO: 10860 - DNA, 20 bp, Artificial Sequence
  Chr8_14 Forward Primer
atgtgagtggggtgaacaca

SEQ ID NO: 10861 - DNA, 20 bp, Artificial Sequence
  Chr8_14 Forward Primer
tctccccattctatccctcc

SEQ ID NO: 10862 - DNA, 26 bp, Artificial Sequence
  Chr8_14 Forward Primer
ttgctactattattattatggccctg

SEQ ID NO: 10863 - DNA, 20 bp, Artificial Sequence
  Chr8_14 Forward Primer
tgaacacctggtagatggca

SEQ ID NO: 10864 - DNA, 20 bp, Artificial Sequence
  Chr8_14 Forward Primer
aagactgacaaagttggggc

SEQ ID NO: 10865 - DNA, 20 bp, Artificial Sequence
  Chr8_14 Reverse Primer
tgttctaccctggagccact

SEQ ID NO: 10866 - DNA, 20 bp, Artificial Sequence
  Chr8_14 Reverse Primer
agtagcttaggcacagggca

SEQ ID NO: 10867 - DNA, 19 bp, Artificial Sequence
  Chr8_14 Reverse Primer
actgtgtgttgggcaagga

SEQ ID NO: 10868 - DNA, 20 bp, Artificial Sequence
  Chr8_14 Reverse Primer
aaaattgatctccttgggca

SEQ ID NO: 10869 - DNA, 20 bp, Artificial Sequence
  Chr8_14 Reverse Primer
ctgtcattggcgtgaaactg

SEQ ID NO: 10870 - DNA, 21 bp, Artificial Sequence
  Chr8_14 Reverse Primer
aaggtagcctgaaggaactca

SEQ ID NO: 10871 - DNA, 20 bp, Artificial Sequence
  Chr8_14 Reverse Primer
ttgaatttgtttcgaacgga

SEQ ID NO: 10872 - DNA, 20 bp, Artificial Sequence
  Chr8_14 Reverse Primer
tgctttccccatttatttgc

SEQ ID NO: 10873 - DNA, 21 bp, Artificial Sequence
  Chr8_14 Reverse Primer
tgctcatttcagaggcaataa

SEQ ID NO: 10874 - DNA, 20 bp, Artificial Sequence
  Chr8_14 Reverse Primer
gaatggacactggcacatca

SEQ ID NO: 10875 - DNA, 20 bp, Artificial Sequence
  Chr8_14 Reverse Primer
caaccctgcgaaggaataat

SEQ ID NO: 10876 - DNA, 20 bp, Artificial Sequence
  Chr8_14 Reverse Primer
tgctgtggtgaggaaaagaa

SEQ ID NO: 10877 - DNA, 20 bp, Artificial Sequence
  Chr8_14 Reverse Primer
tgtttaaggaaaggaggggc

SEQ ID NO: 10878 - DNA, 20 bp, Artificial Sequence
  Chr8_14 Reverse Primer
cacccccaagattcatcaag

SEQ ID NO: 10879 - DNA, 20 bp, Artificial Sequence
  Chr8_14 Reverse Primer
caaatccctccctcagtcag

SEQ ID NO: 10880 - DNA, 20 bp, Artificial Sequence
  Chr8_14 Reverse Primer
tacctgcccatttatcctgc

SEQ ID NO: 10881 - DNA, 20 bp, Artificial Sequence
  Chr8_14 Reverse Primer
ggctcttgccaggtgaatta

SEQ ID NO: 10882 - DNA, 20 bp, Artificial Sequence
  Chr8_14 Reverse Primer
cggacaaagcaggttgactt

SEQ ID NO: 10883 - DNA, 20 bp, Artificial Sequence
  Chr8_14 Reverse Primer
tcccttgaagcactttgagc

SEQ ID NO: 10884 - DNA, 20 bp, Artificial Sequence
  Chr8_14 Reverse Primer
cacatcccgtgttttcctct

SEQ ID NO: 10885 - DNA, 22 bp, Artificial Sequence
  Chr8_14 Reverse Primer
tcagttgtctgagcatcacctt

SEQ ID NO: 10886 - DNA, 20 bp, Artificial Sequence
  Chr8_14 Reverse Primer
catctggagcacaggattca

SEQ ID NO: 10887 - DNA, 20 bp, Artificial Sequence
  Chr8_14 Reverse Primer
caagaaaggatggccaaaaa

SEQ ID NO: 10888 - DNA, 20 bp, Artificial Sequence
  Chr8_14 Reverse Primer
tggattgttgcacagctttt

SEQ ID NO: 10889 - DNA, 20 bp, Artificial Sequence
  Chr8_14 Reverse Primer
ttttacaactgccgtttcca

SEQ ID NO: 10890 - DNA, 20 bp, Artificial Sequence
  Chr8_14 Reverse Primer
gcactggactctgaatgtgc

SEQ ID NO: 10891 - DNA, 20 bp, Artificial Sequence
  Chr8_14 Reverse Primer
gcacttccccaggaaatgta

SEQ ID NO: 10892 - DNA, 20 bp, Artificial Sequence
  Chr8_14 Reverse Primer
gcagctggacaacatagcag

SEQ ID NO: 10893 - DNA, 22 bp, Artificial Sequence
  Chr8_14 Reverse Primer
tttattccatattcagtgctgc

SEQ ID NO: 10894 - DNA, 20 bp, Artificial Sequence
  Chr8_14 Reverse Primer
taaatcccttcagctctggc

SEQ ID NO: 10895 - DNA, 21 bp, Artificial Sequence
  Chr8_14 Reverse Primer
tggaatccaatttaatgcacc

SEQ ID NO: 10896 - DNA, 20 bp, Artificial Sequence
  Chr8_14 Reverse Primer
gttcaggaggggagctgact

SEQ ID NO: 10897 - DNA, 20 bp, Artificial Sequence
  Chr8_14 Reverse Primer
accagaaagatcgctgcatt

SEQ ID NO: 10898 - DNA, 20 bp, Artificial Sequence
  Chr8_14 Reverse Primer
acccagtttgaagggttcct

SEQ ID NO: 10899 - DNA, 20 bp, Artificial Sequence
  Chr8_14 Reverse Primer
ttgacagggtagcaaccaca

SEQ ID NO: 10900 - DNA, 20 bp, Artificial Sequence
  Chr8_14 Reverse Primer
agtgaattgctgggcatagg

SEQ ID NO: 10901 - DNA, 27 bp, Artificial Sequence
  Chr8_14 Reverse Primer
cctagaaactttacagtgataccctga

SEQ ID NO: 10902 - DNA, 20 bp, Artificial Sequence
  Chr8_14 Reverse Primer
ccctgatgttgtgttggtga

SEQ ID NO: 10903 - DNA, 20 bp, Artificial Sequence
  Chr8_14 Reverse Primer
ggcacattctcattgttcca

SEQ ID NO: 10904 - DNA, 20 bp, Artificial Sequence
  Chr8_14 Reverse Primer
aaggaatgctcaaaacctgc

SEQ ID NO: 10905 - DNA, 20 bp, Artificial Sequence
  Chr8_14 Reverse Primer
gaaatccaaggtcctgatgc

SEQ ID NO: 10906 - DNA, 20 bp, Artificial Sequence
  Chr8_14 Reverse Primer
tcacgcaatagcctttctca

SEQ ID NO: 10907 - DNA, 21 bp, Artificial Sequence
  Chr8_14 Reverse Primer
tctcaatctgggaagtggaag

SEQ ID NO: 10908 - DNA, 21 bp, Artificial Sequence
  Chr8_14 Reverse Primer
caggtgacttatctggttggc

SEQ ID NO: 10909 - DNA, 20 bp, Artificial Sequence
  Chr8_14 Reverse Primer
cctgctctgtcgttagcctc

SEQ ID NO: 10910 - DNA, 20 bp, Artificial Sequence
  Chr8_14 Reverse Primer
tccctcctttctcctccttt

SEQ ID NO: 10911 - DNA, 22 bp, Artificial Sequence
  Chr8_14 Reverse Primer
cgtgttatgtcatccaatcctt

SEQ ID NO: 10912 - DNA, 20 bp, Artificial Sequence
  Chr8_14 Reverse Primer
tgctttctgctcctcattcc

SEQ ID NO: 10913 - DNA, 20 bp, Artificial Sequence
  Chr8_14 Reverse Primer
caggtcatcctccaagtggt

SEQ ID NO: 10914 - DNA, 20 bp, Artificial Sequence
  Chr8_14 Reverse Primer
ttcaccggcattgaggtagt

SEQ ID NO: 10915 - DNA, 20 bp, Artificial Sequence
  Chr8_14 Reverse Primer
gactgtgcccctagcaactc

SEQ ID NO: 10916 - DNA, 18 bp, Artificial Sequence
  Chr8_14 Reverse Primer
cgacacatcacggagcag

SEQ ID NO: 10917 - DNA, 20 bp, Artificial Sequence
  Chr8_14 Reverse Primer
gacctacagggagccctagc

SEQ ID NO: 10918 - DNA, 20 bp, Artificial Sequence
  Chr8_14 Reverse Primer
ctgctaacttcgcacccatc

SEQ ID NO: 10919 - DNA, 20 bp, Artificial Sequence
  Chr8_14 Reverse Primer
gccaaatggactccaaagaa

SEQ ID NO: 10920 - DNA, 20 bp, Artificial Sequence
  Chr8_14 Reverse Primer
ctccaaatttctcccagtcg

SEQ ID NO: 10921 - DNA, 18 bp, Artificial Sequence
  Chr8_14 Reverse Primer
ccagctggaacgctggat

SEQ ID NO: 10922 - DNA, 20 bp, Artificial Sequence
  Chr8_14 Reverse Primer
tgactgcctctatgattgcg

SEQ ID NO: 10923 - DNA, 20 bp, Artificial Sequence
  Chr8_14 Reverse Primer
cggctcatctgtcattagca

SEQ ID NO: 10924 - DNA, 20 bp, Artificial Sequence
  Chr8_14 Reverse Primer
tttccttaggacaggcagga

SEQ ID NO: 10925 - DNA, 20 bp, Artificial Sequence
  Chr8_14 Reverse Primer
cttttccagggagtgaacga

SEQ ID NO: 10926 - DNA, 20 bp, Artificial Sequence
  Chr8_14 Reverse Primer
caggaatgtaattgcagggg

SEQ ID NO: 10927 - DNA, 20 bp, Artificial Sequence
  Chr8_14 Reverse Primer
aaagtgatgccttccattgc

SEQ ID NO: 10928 - DNA, 20 bp, Artificial Sequence
  Chr8_14 Reverse Primer
tacggtaacacccttccagc

SEQ ID NO: 10929 - DNA, 20 bp, Artificial Sequence
  Chr8_14 Reverse Primer
gccaatggctagtccctgta

SEQ ID NO: 10930 - DNA, 20 bp, Artificial Sequence
  Chr8_14 Reverse Primer
ccacatgaagcctcggtact

SEQ ID NO: 10931 - DNA, 20 bp, Artificial Sequence
  Chr8_14 Reverse Primer
gtaggccctccattcaaaca

SEQ ID NO: 10932 - DNA, 20 bp, Artificial Sequence
  Chr8_14 Reverse Primer
tgtccccttcctgaactgag

SEQ ID NO: 10933 - DNA, 21 bp, Artificial Sequence
  Chr8_14 Reverse Primer
ccagatgaaatgtgagtgcaa

SEQ ID NO: 10934 - DNA, 27 bp, Artificial Sequence
  Chr8_14 Reverse Primer
ctgtgatattaaaatagccatcagata

SEQ ID NO: 10935 - DNA, 20 bp, Artificial Sequence
  Chr8_14 Reverse Primer
cccaagaaggatgtgggtta

SEQ ID NO: 10936 - DNA, 20 bp, Artificial Sequence
  Chr8_14 Reverse Primer
gtaaatgggatcatgggcag

SEQ ID NO: 10937 - DNA, 21 bp, Artificial Sequence
  Chr8_14 Reverse Primer
cgcttcaagaaaggagtagca

SEQ ID NO: 10938 - DNA, 26 bp, Artificial Sequence
  Chr8_14 Reverse Primer
tcactatggttgtgttttactgtttt

SEQ ID NO: 10939 - DNA, 21 bp, Artificial Sequence
  Chr8_14 Reverse Primer
tgtaccaagtgctttgcatga

SEQ ID NO: 10940 - DNA, 20 bp, Artificial Sequence
  Chr8_14 Reverse Primer
cagcagctgaagaaaggagg

SEQ ID NO: 10941 - DNA, 20 bp, Artificial Sequence
  Chr8_14 Reverse Primer
ggcatttgagggtaaagcag

SEQ ID NO: 10942 - DNA, 20 bp, Artificial Sequence
  Chr8_14 Reverse Primer
ccaccagcaaatccctacat

SEQ ID NO: 10943 - DNA, 20 bp, Artificial Sequence
  Chr8_14 Reverse Primer
aaacctgttgcctgtccaag

SEQ ID NO: 10944 - DNA, 20 bp, Artificial Sequence
  Chr8_14 Reverse Primer
aagtgggcactccaagaaga

SEQ ID NO: 10945 - DNA, 20 bp, Artificial Sequence
  Chr8_14 Reverse Primer
attgggtgattttggctcag

SEQ ID NO: 10946 - DNA, 20 bp, Artificial Sequence
  Chr8_14 Reverse Primer
gtgacaccacaaaatggcag

SEQ ID NO: 10947 - DNA, 20 bp, Artificial Sequence
  Chr8_14 Reverse Primer
cccagtgaaacattcccaat

SEQ ID NO: 10948 - DNA, 20 bp, Artificial Sequence
  Chr8_14 Reverse Primer
ccacccaagtaccttcgaga

SEQ ID NO: 10949 - DNA, 20 bp, Artificial Sequence
  Chr8_14 Reverse Primer
cattgtcaacctggaagggt

SEQ ID NO: 10950 - DNA, 20 bp, Artificial Sequence
  Chr8_14 Reverse Primer
ggggcaaagagataatggtg

SEQ ID NO: 10951 - DNA, 20 bp, Artificial Sequence
  Chr8_14 Reverse Primer
ctaccctgcaggattgctgt

SEQ ID NO: 10952 - DNA, 20 bp, Artificial Sequence
  Chr8_14 Reverse Primer
agagcaccagatgtcccttg

SEQ ID NO: 10953 - DNA, 20 bp, Artificial Sequence
  Chr8_14 Reverse Primer
attcagggccatcacttcac

SEQ ID NO: 10954 - DNA, 20 bp, Artificial Sequence
  Chr8_14 Reverse Primer
ggtgctgcatcctttcattt

SEQ ID NO: 10955 - DNA, 20 bp, Artificial Sequence
  Chr8_14 Reverse Primer
ctggtgtcatgattgtggga

SEQ ID NO: 10956 - DNA, 20 bp, Artificial Sequence
  Chr8_14 Reverse Primer
acctgtgccaaggacttcac

SEQ ID NO: 10957 - DNA, 20 bp, Artificial Sequence
  Chr8_14 Reverse Primer
tatccttctccagccagacc

SEQ ID NO: 10958 - DNA, 20 bp, Artificial Sequence
  Chr8_14 Reverse Primer
gctctgctctcttggcagtt

SEQ ID NO: 10959 - DNA, 20 bp, Artificial Sequence
  Chr8_14 Reverse Primer
aaagtgctcagttgcccagt

SEQ ID NO: 10960 - DNA, 21 bp, Artificial Sequence
  Chr8_14 Reverse Primer
caaccgcagtttttatctgga

SEQ ID NO: 10961 - DNA, 20 bp, Artificial Sequence
  Chr8_15 Forward Primer
cctcaaaccacacacaccac

SEQ ID NO: 10962 - DNA, 20 bp, Artificial Sequence
  Chr8_15 Forward Primer
tcgtctcatgtgtgatgtgc

SEQ ID NO: 10963 - DNA, 20 bp, Artificial Sequence
  Chr8_15 Forward Primer
cctcagggaaatgtgactgg

SEQ ID NO: 10964 - DNA, 20 bp, Artificial Sequence
  Chr8_15 Forward Primer
cagatctcagggctacggtg

SEQ ID NO: 10965 - DNA, 20 bp, Artificial Sequence
  Chr8_15 Forward Primer
cctccggcacgtatttgtag

SEQ ID NO: 10966 - DNA, 20 bp, Artificial Sequence
  Chr8_15 Forward Primer
cctcgggaacacacattttt

SEQ ID NO: 10967 - DNA, 20 bp, Artificial Sequence
  Chr8_15 Forward Primer
cttccccatgttcagagtcc

SEQ ID NO: 10968 - DNA, 19 bp, Artificial Sequence
  Chr8_15 Forward Primer
ccccaaaagggtctcagaa

SEQ ID NO: 10969 - DNA, 20 bp, Artificial Sequence
  Chr8_15 Forward Primer
ttggggagctcttacctgaa

SEQ ID NO: 10970 - DNA, 20 bp, Artificial Sequence
  Chr8_15 Forward Primer
gaaagtcccatccaggagga

SEQ ID NO: 10971 - DNA, 20 bp, Artificial Sequence
  Chr8_15 Forward Primer
agaaagggagggaccgtatg

SEQ ID NO: 10972 - DNA, 18 bp, Artificial Sequence
  Chr8_15 Forward Primer
caccaagttcccagaggc

SEQ ID NO: 10973 - DNA, 20 bp, Artificial Sequence
  Chr8_15 Forward Primer
cagagaaccaggtgaggagg

SEQ ID NO: 10974 - DNA, 20 bp, Artificial Sequence
  Chr8_15 Forward Primer
gacccaagcttgccgtagta

SEQ ID NO: 10975 - DNA, 20 bp, Artificial Sequence
  Chr8_15 Forward Primer
cgactgtacctcgtctggga

SEQ ID NO: 10976 - DNA, 20 bp, Artificial Sequence
  Chr8_15 Forward Primer
gctggagaaggagaaagcag

SEQ ID NO: 10977 - DNA, 19 bp, Artificial Sequence
  Chr8_15 Forward Primer
cagcagataggcacggatg

SEQ ID NO: 10978 - DNA, 20 bp, Artificial Sequence
  Chr8_15 Forward Primer
ctcttaggcacagaggcagc

SEQ ID NO: 10979 - DNA, 20 bp, Artificial Sequence
  Chr8_15 Forward Primer
tctgaaaggaaacgacaccc

SEQ ID NO: 10980 - DNA, 20 bp, Artificial Sequence
  Chr8_15 Forward Primer
cagtgccctcctgacaagat

SEQ ID NO: 10981 - DNA, 19 bp, Artificial Sequence
  Chr8_15 Forward Primer
acgttgttccagcagggag

SEQ ID NO: 10982 - DNA, 21 bp, Artificial Sequence
  Chr8_15 Forward Primer
ttaacagttttgatgggtgcc

SEQ ID NO: 10983 - DNA, 20 bp, Artificial Sequence
  Chr8_15 Forward Primer
tccctgtgaacaggttcctc

SEQ ID NO: 10984 - DNA, 20 bp, Artificial Sequence
  Chr8_15 Forward Primer
ggaaccaggtgaggctgtag

SEQ ID NO: 10985 - DNA, 20 bp, Artificial Sequence
  Chr8_15 Forward Primer
agcatcagatggccagagaa

SEQ ID NO: 10986 - DNA, 20 bp, Artificial Sequence
  Chr8_15 Forward Primer
acaagagcaggacggtgact

SEQ ID NO: 10987 - DNA, 20 bp, Artificial Sequence
  Chr8_15 Forward Primer
ctccctatcacagaaacccg

SEQ ID NO: 10988 - DNA, 20 bp, Artificial Sequence
  Chr8_15 Forward Primer
cggctcatctggctaacatt

SEQ ID NO: 10989 - DNA, 23 bp, Artificial Sequence
  Chr8_15 Forward Primer
gggtacattttattcctactcgg

SEQ ID NO: 10990 - DNA, 20 bp, Artificial Sequence
  Chr8_15 Forward Primer
ctcagaaagaatgggaagcg

SEQ ID NO: 10991 - DNA, 20 bp, Artificial Sequence
  Chr8_15 Forward Primer
tttccacacagcattgaagc

SEQ ID NO: 10992 - DNA, 20 bp, Artificial Sequence
  Chr8_15 Forward Primer
tcccttcgcttaatcctgaa

SEQ ID NO: 10993 - DNA, 20 bp, Artificial Sequence
  Chr8_15 Forward Primer
ggtgattcccatgagtgtcc

SEQ ID NO: 10994 - DNA, 20 bp, Artificial Sequence
  Chr8_15 Forward Primer
cctctgtttcctggagcatt

SEQ ID NO: 10995 - DNA, 19 bp, Artificial Sequence
  Chr8_15 Forward Primer
gacatcatcgtgggtcagc

SEQ ID NO: 10996 - DNA, 20 bp, Artificial Sequence
  Chr8_15 Forward Primer
tatccaagtttcagccaccc

SEQ ID NO: 10997 - DNA, 20 bp, Artificial Sequence
  Chr8_15 Forward Primer
cagaagggaggcttctcacc

SEQ ID NO: 10998 - DNA, 20 bp, Artificial Sequence
  Chr8_15 Forward Primer
ccctggtctctcctgtgttg

SEQ ID NO: 10999 - DNA, 20 bp, Artificial Sequence
  Chr8_15 Forward Primer
ttcaaaggggatcagtggag

SEQ ID NO: 11000 - DNA, 20 bp, Artificial Sequence
  Chr8_15 Forward Primer
gactggggtacacaaggcag

SEQ ID NO: 11001 - DNA, 20 bp, Artificial Sequence
  Chr8_15 Forward Primer
aagcaccttggcaagaaaaa

SEQ ID NO: 11002 - DNA, 20 bp, Artificial Sequence
  Chr8_15 Forward Primer
caacaatggtgagaccagga

SEQ ID NO: 11003 - DNA, 20 bp, Artificial Sequence
  Chr8_15 Forward Primer
agacaggaaagacactgggc

SEQ ID NO: 11004 - DNA, 20 bp, Artificial Sequence
  Chr8_15 Forward Primer
ctgtgggagaatctggcatt

SEQ ID NO: 11005 - DNA, 20 bp, Artificial Sequence
  Chr8_15 Forward Primer
cccatagatgatgctgtccc

SEQ ID NO: 11006 - DNA, 20 bp, Artificial Sequence
  Chr8_15 Forward Primer
cctctctgccctatcagcac

SEQ ID NO: 11007 - DNA, 20 bp, Artificial Sequence
  Chr8_15 Forward Primer
ctagacctcctctggggtcc

SEQ ID NO: 11008 - DNA, 20 bp, Artificial Sequence
  Chr8_15 Forward Primer
gagcatagcaggcttccaac

SEQ ID NO: 11009 - DNA, 20 bp, Artificial Sequence
  Chr8_15 Forward Primer
cccaccctacctcctcttct

SEQ ID NO: 11010 - DNA, 20 bp, Artificial Sequence
  Chr8_15 Forward Primer
ctgggtgatgagcctgactt

SEQ ID NO: 11011 - DNA, 20 bp, Artificial Sequence
  Chr8_15 Forward Primer
aatgctggaaggacaacacc

SEQ ID NO: 11012 - DNA, 20 bp, Artificial Sequence
  Chr8_15 Forward Primer
gagcaccccatctcaacaag

SEQ ID NO: 11013 - DNA, 19 bp, Artificial Sequence
  Chr8_15 Forward Primer
gaaggtctgaagccccaag

SEQ ID NO: 11014 - DNA, 20 bp, Artificial Sequence
  Chr8_15 Forward Primer
gagaaatgctgccagagagc

SEQ ID NO: 11015 - DNA, 20 bp, Artificial Sequence
  Chr8_15 Forward Primer
gcctctctcttctcccctgt

SEQ ID NO: 11016 - DNA, 19 bp, Artificial Sequence
  Chr8_15 Forward Primer
gctctgggctgagagtgtg

SEQ ID NO: 11017 - DNA, 20 bp, Artificial Sequence
  Chr8_15 Forward Primer
ttccagacaaagaaccctcg

SEQ ID NO: 11018 - DNA, 20 bp, Artificial Sequence
  Chr8_15 Forward Primer
gatcaggagaccccacttca

SEQ ID NO: 11019 - DNA, 20 bp, Artificial Sequence
  Chr8_15 Forward Primer
cctcaacaatccatcacacg

SEQ ID NO: 11020 - DNA, 20 bp, Artificial Sequence
  Chr8_15 Forward Primer
gagtcgggcattaggaagtg

SEQ ID NO: 11021 - DNA, 21 bp, Artificial Sequence
  Chr8_15 Forward Primer
cctttatgacacttctgccca

SEQ ID NO: 11022 - DNA, 20 bp, Artificial Sequence
  Chr8_15 Forward Primer
agggagtggggactgttctt

SEQ ID NO: 11023 - DNA, 20 bp, Artificial Sequence
  Chr8_15 Forward Primer
gctcttcccaggactgaagg

SEQ ID NO: 11024 - DNA, 20 bp, Artificial Sequence
  Chr8_15 Forward Primer
agcttgaacctaccccaggt

SEQ ID NO: 11025 - DNA, 20 bp, Artificial Sequence
  Chr8_15 Forward Primer
gtttaaatgtgtgtccccgc

SEQ ID NO: 11026 - DNA, 21 bp, Artificial Sequence
  Chr8_15 Forward Primer
gcagcagcagtactgaaaacc

SEQ ID NO: 11027 - DNA, 20 bp, Artificial Sequence
  Chr8_15 Forward Primer
atggtctagcaagggtcacg

SEQ ID NO: 11028 - DNA, 25 bp, Artificial Sequence
  Chr8_15 Forward Primer
tcaaaaacaaaaacaaaaacaaaca

SEQ ID NO: 11029 - DNA, 20 bp, Artificial Sequence
  Chr8_15 Forward Primer
ccccaaagttttccattgtg

SEQ ID NO: 11030 - DNA, 20 bp, Artificial Sequence
  Chr8_15 Forward Primer
atcatctgggaagcatcctg

SEQ ID NO: 11031 - DNA, 21 bp, Artificial Sequence
  Chr8_15 Forward Primer
tttttcggcagaaataattga

SEQ ID NO: 11032 - DNA, 20 bp, Artificial Sequence
  Chr8_15 Forward Primer
ctgtgatgtcgtccttccct

SEQ ID NO: 11033 - DNA, 20 bp, Artificial Sequence
  Chr8_15 Forward Primer
cgagcaggtaatgcctcata

SEQ ID NO: 11034 - DNA, 20 bp, Artificial Sequence
  Chr8_15 Forward Primer
tcacgtgctcgtatctccaa

SEQ ID NO: 11035 - DNA, 20 bp, Artificial Sequence
  Chr8_15 Forward Primer
agcccacatacgtggttctc

SEQ ID NO: 11036 - DNA, 20 bp, Artificial Sequence
  Chr8_15 Forward Primer
atttacgtagcaccctcccc

SEQ ID NO: 11037 - DNA, 20 bp, Artificial Sequence
  Chr8_15 Forward Primer
gggaggaaagaaccatcaga

SEQ ID NO: 11038 - DNA, 20 bp, Artificial Sequence
  Chr8_15 Forward Primer
gagcgtgctatccacagaca

SEQ ID NO: 11039 - DNA, 20 bp, Artificial Sequence
  Chr8_15 Forward Primer
cctctgcaggtgactcagtg

SEQ ID NO: 11040 - DNA, 20 bp, Artificial Sequence
  Chr8_15 Forward Primer
tttagtcattacgcccagcc

SEQ ID NO: 11041 - DNA, 20 bp, Artificial Sequence
  Chr8_15 Forward Primer
caatcaacaggaggggagac

SEQ ID NO: 11042 - DNA, 20 bp, Artificial Sequence
  Chr8_15 Forward Primer
ctctgagacaccacacgcat

SEQ ID NO: 11043 - DNA, 20 bp, Artificial Sequence
  Chr8_15 Forward Primer
ctccagaagtgcatcgttca

SEQ ID NO: 11044 - DNA, 20 bp, Artificial Sequence
  Chr8_15 Forward Primer
aggcgctgtccatttaagaa

SEQ ID NO: 11045 - DNA, 20 bp, Artificial Sequence
  Chr8_15 Forward Primer
tggtgcatacagggacaaga

SEQ ID NO: 11046 - DNA, 21 bp, Artificial Sequence
  Chr8_15 Forward Primer
cccacagactcaaacttcacc

SEQ ID NO: 11047 - DNA, 20 bp, Artificial Sequence
  Chr8_15 Forward Primer
tgtttagaccagtgggggaa

SEQ ID NO: 11048 - DNA, 20 bp, Artificial Sequence
  Chr8_15 Forward Primer
ctcctccattaggcagcttg

SEQ ID NO: 11049 - DNA, 20 bp, Artificial Sequence
  Chr8_15 Forward Primer
acagagagctccacctccaa

SEQ ID NO: 11050 - DNA, 21 bp, Artificial Sequence
  Chr8_15 Forward Primer
ggtttgagcaagcctacacag

SEQ ID NO: 11051 - DNA, 20 bp, Artificial Sequence
  Chr8_15 Forward Primer
cctattcttcatggtgcgct

SEQ ID NO: 11052 - DNA, 20 bp, Artificial Sequence
  Chr8_15 Forward Primer
tccttaggggatgcacagtc

SEQ ID NO: 11053 - DNA, 20 bp, Artificial Sequence
  Chr8_15 Forward Primer
tgaatgtgacagaccctgga

SEQ ID NO: 11054 - DNA, 20 bp, Artificial Sequence
  Chr8_15 Forward Primer
agtggggtgcaatgaatgag

SEQ ID NO: 11055 - DNA, 20 bp, Artificial Sequence
  Chr8_15 Forward Primer
tctccaagaggagccaacat

SEQ ID NO: 11056 - DNA, 20 bp, Artificial Sequence
  Chr8_15 Forward Primer
caaagtcacctgatggcaga

SEQ ID NO: 11057 - DNA, 20 bp, Artificial Sequence
  Chr8_15 Reverse Primer
attcactcacgtgcttgctg

SEQ ID NO: 11058 - DNA, 20 bp, Artificial Sequence
  Chr8_15 Reverse Primer
tatgcctagacttcctggcg

SEQ ID NO: 11059 - DNA, 20 bp, Artificial Sequence
  Chr8_15 Reverse Primer
gacgttcacgacacagatgg

SEQ ID NO: 11060 - DNA, 20 bp, Artificial Sequence
  Chr8_15 Reverse Primer
tcagggtgatctacgtgctg

SEQ ID NO: 11061 - DNA, 20 bp, Artificial Sequence
  Chr8_15 Reverse Primer
ggagaagaaatcgtcctggg

SEQ ID NO: 11062 - DNA, 20 bp, Artificial Sequence
  Chr8_15 Reverse Primer
gtgaggatggccgaagtaaa

SEQ ID NO: 11063 - DNA, 20 bp, Artificial Sequence
  Chr8_15 Reverse Primer
cagcacagagctggatgaag

SEQ ID NO: 11064 - DNA, 20 bp, Artificial Sequence
  Chr8_15 Reverse Primer
gcaccccagaaaactcagtg

SEQ ID NO: 11065 - DNA, 20 bp, Artificial Sequence
  Chr8_15 Reverse Primer
gctcttagaatgagcagccg

SEQ ID NO: 11066 - DNA, 18 bp, Artificial Sequence
  Chr8_15 Reverse Primer
catgcagtggctccgaga

SEQ ID NO: 11067 - DNA, 20 bp, Artificial Sequence
  Chr8_15 Reverse Primer
tgtgaacggggtgtctgtta

SEQ ID NO: 11068 - DNA, 18 bp, Artificial Sequence
  Chr8_15 Reverse Primer
tcatcttcgaaggcgacc

SEQ ID NO: 11069 - DNA, 19 bp, Artificial Sequence
  Chr8_15 Reverse Primer
agcatgagcgacctgtacg

SEQ ID NO: 11070 - DNA, 20 bp, Artificial Sequence
  Chr8_15 Reverse Primer
aaggaggacgagaccttgct

SEQ ID NO: 11071 - DNA, 20 bp, Artificial Sequence
  Chr8_15 Reverse Primer
gactggacccagaccttcct

SEQ ID NO: 11072 - DNA, 20 bp, Artificial Sequence
  Chr8_15 Reverse Primer
tactcccatccagggtgaac

SEQ ID NO: 11073 - DNA, 20 bp, Artificial Sequence
  Chr8_15 Reverse Primer
ttccatgtggctgtttgcta

SEQ ID NO: 11074 - DNA, 20 bp, Artificial Sequence
  Chr8_15 Reverse Primer
gaattcatgcttccagcaca

SEQ ID NO: 11075 - DNA, 20 bp, Artificial Sequence
  Chr8_15 Reverse Primer
cattgatctggattcagggg

SEQ ID NO: 11076 - DNA, 20 bp, Artificial Sequence
  Chr8_15 Reverse Primer
aaatgtgacccagatggcag

SEQ ID NO: 11077 - DNA, 20 bp, Artificial Sequence
  Chr8_15 Reverse Primer
gggagctgagggagttaagc

SEQ ID NO: 11078 - DNA, 20 bp, Artificial Sequence
  Chr8_15 Reverse Primer
aatgcgtatctgacaccacg

SEQ ID NO: 11079 - DNA, 20 bp, Artificial Sequence
  Chr8_15 Reverse Primer
taagtttctcggccacacct

SEQ ID NO: 11080 - DNA, 20 bp, Artificial Sequence
  Chr8_15 Reverse Primer
atctggccttgcagaaaaag

SEQ ID NO: 11081 - DNA, 20 bp, Artificial Sequence
  Chr8_15 Reverse Primer
ctcaaagtggccttcagcag

SEQ ID NO: 11082 - DNA, 20 bp, Artificial Sequence
  Chr8_15 Reverse Primer
aatgtgagcatgacaggtgc

SEQ ID NO: 11083 - DNA, 20 bp, Artificial Sequence
  Chr8_15 Reverse Primer
tcacagtggagggtcctttc

SEQ ID NO: 11084 - DNA, 20 bp, Artificial Sequence
  Chr8_15 Reverse Primer
cagtgcaaaggtcaaagcaa

SEQ ID NO: 11085 - DNA, 20 bp, Artificial Sequence
  Chr8_15 Reverse Primer
gccctctgcgtagttttgat

SEQ ID NO: 11086 - DNA, 20 bp, Artificial Sequence
  Chr8_15 Reverse Primer
ttgaaaagggacagcaggag

SEQ ID NO: 11087 - DNA, 20 bp, Artificial Sequence
  Chr8_15 Reverse Primer
ggaaagaggactgctggaaa

SEQ ID NO: 11088 - DNA, 21 bp, Artificial Sequence
  Chr8_15 Reverse Primer
ggttcaggacacagtggatca

SEQ ID NO: 11089 - DNA, 20 bp, Artificial Sequence
  Chr8_15 Reverse Primer
aagacgtaacgggatgaacg

SEQ ID NO: 11090 - DNA, 20 bp, Artificial Sequence
  Chr8_15 Reverse Primer
gtcccagcagagaaatggaa

SEQ ID NO: 11091 - DNA, 20 bp, Artificial Sequence
  Chr8_15 Reverse Primer
tcgggtggagttaggagatg

SEQ ID NO: 11092 - DNA, 19 bp, Artificial Sequence
  Chr8_15 Reverse Primer
gcagcgcctcctctagatt

SEQ ID NO: 11093 - DNA, 20 bp, Artificial Sequence
  Chr8_15 Reverse Primer
agtcagagctgagggcaaag

SEQ ID NO: 11094 - DNA, 20 bp, Artificial Sequence
  Chr8_15 Reverse Primer
gacaccgcagggtgtaaagt

SEQ ID NO: 11095 - DNA, 20 bp, Artificial Sequence
  Chr8_15 Reverse Primer
cagctgtcgttgggtgtaga

SEQ ID NO: 11096 - DNA, 20 bp, Artificial Sequence
  Chr8_15 Reverse Primer
attgggcttgagctttcctt

SEQ ID NO: 11097 - DNA, 20 bp, Artificial Sequence
  Chr8_15 Reverse Primer
agcgttgtgtgtgtttggag

SEQ ID NO: 11098 - DNA, 20 bp, Artificial Sequence
  Chr8_15 Reverse Primer
ataggcgactttcccactcc

SEQ ID NO: 11099 - DNA, 20 bp, Artificial Sequence
  Chr8_15 Reverse Primer
ctcaggaaaagcacctgagc

SEQ ID NO: 11100 - DNA, 20 bp, Artificial Sequence
  Chr8_15 Reverse Primer
ccacccagatcactccatct

SEQ ID NO: 11101 - DNA, 19 bp, Artificial Sequence
  Chr8_15 Reverse Primer
cacaagctggacacagggt

SEQ ID NO: 11102 - DNA, 20 bp, Artificial Sequence
  Chr8_15 Reverse Primer
ttctggaactgattgacccc

SEQ ID NO: 11103 - DNA, 20 bp, Artificial Sequence
  Chr8_15 Reverse Primer
gtacttcaggcagaggcagc

SEQ ID NO: 11104 - DNA, 20 bp, Artificial Sequence
  Chr8_15 Reverse Primer
gagtctggtgtggagaggga

SEQ ID NO: 11105 - DNA, 18 bp, Artificial Sequence
  Chr8_15 Reverse Primer
acctgccacgtgcttgtt

SEQ ID NO: 11106 - DNA, 20 bp, Artificial Sequence
  Chr8_15 Reverse Primer
ctccataatgcccacctttc

SEQ ID NO: 11107 - DNA, 20 bp, Artificial Sequence
  Chr8_15 Reverse Primer
tcggtgatgcagaaacagag

SEQ ID NO: 11108 - DNA, 19 bp, Artificial Sequence
  Chr8_15 Reverse Primer
tgtctcaggacccctctcc

SEQ ID NO: 11109 - DNA, 20 bp, Artificial Sequence
  Chr8_15 Reverse Primer
aggtggctaattccacagga

SEQ ID NO: 11110 - DNA, 20 bp, Artificial Sequence
  Chr8_15 Reverse Primer
gaaatgcctcactgggtgtc

SEQ ID NO: 11111 - DNA, 18 bp, Artificial Sequence
  Chr8_15 Reverse Primer
ctgtccctgccctgtctc

SEQ ID NO: 11112 - DNA, 20 bp, Artificial Sequence
  Chr8_15 Reverse Primer
catccagtggtgaccttgtg

SEQ ID NO: 11113 - DNA, 20 bp, Artificial Sequence
  Chr8_15 Reverse Primer
cgcacacagagcagtctcat

SEQ ID NO: 11114 - DNA, 20 bp, Artificial Sequence
  Chr8_15 Reverse Primer
agaccccttctgtaggccag

SEQ ID NO: 11115 - DNA, 20 bp, Artificial Sequence
  Chr8_15 Reverse Primer
ggtgtttctggccatctgtt

SEQ ID NO: 11116 - DNA, 20 bp, Artificial Sequence
  Chr8_15 Reverse Primer
aggcagggtacaatgaacga

SEQ ID NO: 11117 - DNA, 20 bp, Artificial Sequence
  Chr8_15 Reverse Primer
ggaattcagcctccactcaa

SEQ ID NO: 11118 - DNA, 20 bp, Artificial Sequence
  Chr8_15 Reverse Primer
tctagaaaccagggctccaa

SEQ ID NO: 11119 - DNA, 18 bp, Artificial Sequence
  Chr8_15 Reverse Primer
agtcctgttggggaagcc

SEQ ID NO: 11120 - DNA, 20 bp, Artificial Sequence
  Chr8_15 Reverse Primer
aacgtggaggtgagctgtgt

SEQ ID NO: 11121 - DNA, 20 bp, Artificial Sequence
  Chr8_15 Reverse Primer
caagccttaacaagccaagc

SEQ ID NO: 11122 - DNA, 20 bp, Artificial Sequence
  Chr8_15 Reverse Primer
cactctacagacacacccgc

SEQ ID NO: 11123 - DNA, 20 bp, Artificial Sequence
  Chr8_15 Reverse Primer
ggcctgacacctaagctctg

SEQ ID NO: 11124 - DNA, 20 bp, Artificial Sequence
  Chr8_15 Reverse Primer
cagtttgaaggcagtcaggg

SEQ ID NO: 11125 - DNA, 20 bp, Artificial Sequence
  Chr8_15 Reverse Primer
ggatttgtctttgggtgcag

SEQ ID NO: 11126 - DNA, 20 bp, Artificial Sequence
  Chr8_15 Reverse Primer
cagtggctctctgaggaagg

SEQ ID NO: 11127 - DNA, 20 bp, Artificial Sequence
  Chr8_15 Reverse Primer
ctgagcgattctgccttttt

SEQ ID NO: 11128 - DNA, 20 bp, Artificial Sequence
  Chr8_15 Reverse Primer
gacagaaagatgggctggaa

SEQ ID NO: 11129 - DNA, 20 bp, Artificial Sequence
  Chr8_15 Reverse Primer
cgtgctgagaggagacactg

SEQ ID NO: 11130 - DNA, 20 bp, Artificial Sequence
  Chr8_15 Reverse Primer
agactgggaagcctggattt

SEQ ID NO: 11131 - DNA, 20 bp, Artificial Sequence
  Chr8_15 Reverse Primer
tccctgctgactggagactt

SEQ ID NO: 11132 - DNA, 20 bp, Artificial Sequence
  Chr8_15 Reverse Primer
gaagagtacctggcactggg

SEQ ID NO: 11133 - DNA, 20 bp, Artificial Sequence
  Chr8_15 Reverse Primer
cagtttcctttttggcagga

SEQ ID NO: 11134 - DNA, 20 bp, Artificial Sequence
  Chr8_15 Reverse Primer
tgtgtgaaactcggaagctg

SEQ ID NO: 11135 - DNA, 20 bp, Artificial Sequence
  Chr8_15 Reverse Primer
aagctcgccttttcttcctc

SEQ ID NO: 11136 - DNA, 20 bp, Artificial Sequence
  Chr8_15 Reverse Primer
aaaaggggcgttcttttgtt

SEQ ID NO: 11137 - DNA, 20 bp, Artificial Sequence
  Chr8_15 Reverse Primer
ctggcctgtggtcacttttt

SEQ ID NO: 11138 - DNA, 20 bp, Artificial Sequence
  Chr8_15 Reverse Primer
gaagtggccccgatgttagt

SEQ ID NO: 11139 - DNA, 20 bp, Artificial Sequence
  Chr8_15 Reverse Primer
cccagagcaactcttggaga

SEQ ID NO: 11140 - DNA, 20 bp, Artificial Sequence
  Chr8_15 Reverse Primer
ggctgtgaagggagagacag

SEQ ID NO: 11141 - DNA, 20 bp, Artificial Sequence
  Chr8_15 Reverse Primer
gttccctgtgatctcggcta

SEQ ID NO: 11142 - DNA, 20 bp, Artificial Sequence
  Chr8_15 Reverse Primer
ttgggcctggcctattagat

SEQ ID NO: 11143 - DNA, 20 bp, Artificial Sequence
  Chr8_15 Reverse Primer
gcttgttatctggggcactc

SEQ ID NO: 11144 - DNA, 20 bp, Artificial Sequence
  Chr8_15 Reverse Primer
gtggcctgggatacacattc

SEQ ID NO: 11145 - DNA, 20 bp, Artificial Sequence
  Chr8_15 Reverse Primer
gggacacagaaggcagacat

SEQ ID NO: 11146 - DNA, 20 bp, Artificial Sequence
  Chr8_15 Reverse Primer
atggttgatggcaagtggtt

SEQ ID NO: 11147 - DNA, 20 bp, Artificial Sequence
  Chr8_15 Reverse Primer
attacattccggaggaggct

SEQ ID NO: 11148 - DNA, 20 bp, Artificial Sequence
  Chr8_15 Reverse Primer
tccaggccagacttgtctct

SEQ ID NO: 11149 - DNA, 20 bp, Artificial Sequence
  Chr8_15 Reverse Primer
cccacgtcttcttgctgaat

SEQ ID NO: 11150 - DNA, 20 bp, Artificial Sequence
  Chr8_15 Reverse Primer
ggaaacgtgtgcagagttga

SEQ ID NO: 11151 - DNA, 20 bp, Artificial Sequence
  Chr8_15 Reverse Primer
ccctggacagaagacgtgat

SEQ ID NO: 11152 - DNA, 20 bp, Artificial Sequence
  Chr8_15 Reverse Primer
ttagtggtgacactgcctgc

SEQ ID NO: 11153 - DNA, 20 bp, Artificial Sequence
  Chr12_1 Forward Primer
tgaccactagatggcagcag

SEQ ID NO: 11154 - DNA, 20 bp, Artificial Sequence
  Chr12_1 Forward Primer
agcttggtagcctgtgcagt

SEQ ID NO: 11155 - DNA, 20 bp, Artificial Sequence
  Chr12_1 Forward Primer
tagattctgagtcggggtgg

SEQ ID NO: 11156 - DNA, 20 bp, Artificial Sequence
  Chr12_1 Forward Primer
gccatagtgtacccctcagc

SEQ ID NO: 11157 - DNA, 20 bp, Artificial Sequence
  Chr12_1 Forward Primer
cttgtcgtctcctctctggg

SEQ ID NO: 11158 - DNA, 20 bp, Artificial Sequence
  Chr12_1 Forward Primer
ggttgcagttcaaaggcttc

SEQ ID NO: 11159 - DNA, 20 bp, Artificial Sequence
  Chr12_1 Forward Primer
tcagcttcatggctgttttg

SEQ ID NO: 11160 - DNA, 19 bp, Artificial Sequence
  Chr12_1 Forward Primer
cgtgcctggcctcagatag

SEQ ID NO: 11161 - DNA, 20 bp, Artificial Sequence
  Chr12_1 Forward Primer
tgcttaggcctaggaagggt

SEQ ID NO: 11162 - DNA, 20 bp, Artificial Sequence
  Chr12_1 Forward Primer
agagtcatgtgtggtgcgaa

SEQ ID NO: 11163 - DNA, 20 bp, Artificial Sequence
  Chr12_1 Forward Primer
gaatgcccaaggaaagttca

SEQ ID NO: 11164 - DNA, 20 bp, Artificial Sequence
  Chr12_1 Forward Primer
ggttttacttgccaggtgga

SEQ ID NO: 11165 - DNA, 20 bp, Artificial Sequence
  Chr12_1 Forward Primer
aaccttcttcctccctcagc

SEQ ID NO: 11166 - DNA, 20 bp, Artificial Sequence
  Chr12_1 Forward Primer
tcctgtgtctttgaggaggc

SEQ ID NO: 11167 - DNA, 20 bp, Artificial Sequence
  Chr12_1 Forward Primer
ggaatagccccacatcagaa

SEQ ID NO: 11168 - DNA, 20 bp, Artificial Sequence
  Chr12_1 Forward Primer
tccctcactgcagcctttat

SEQ ID NO: 11169 - DNA, 20 bp, Artificial Sequence
  Chr12_1 Forward Primer
gctgtgggatgaaaggtgat

SEQ ID NO: 11170 - DNA, 20 bp, Artificial Sequence
  Chr12_1 Forward Primer
tcagtgaggcttgtgtttgg

SEQ ID NO: 11171 - DNA, 20 bp, Artificial Sequence
  Chr12_1 Forward Primer
ggtcattcctagggctcctt

SEQ ID NO: 11172 - DNA, 20 bp, Artificial Sequence
  Chr12_1 Forward Primer
gttcttccttggcagtgctc

SEQ ID NO: 11173 - DNA, 20 bp, Artificial Sequence
  Chr12_1 Forward Primer
tatggggaaactgagtccca

SEQ ID NO: 11174 - DNA, 20 bp, Artificial Sequence
  Chr12_1 Forward Primer
tgggaaatcggaaatgaaag

SEQ ID NO: 11175 - DNA, 20 bp, Artificial Sequence
  Chr12_1 Forward Primer
taggtttgtggtcaatggca

SEQ ID NO: 11176 - DNA, 22 bp, Artificial Sequence
  Chr12_1 Forward Primer
cctccgtctctcctaccagtat

SEQ ID NO: 11177 - DNA, 20 bp, Artificial Sequence
  Chr12_1 Forward Primer
ctcctctttcctgcctcctt

SEQ ID NO: 11178 - DNA, 20 bp, Artificial Sequence
  Chr12_1 Forward Primer
gagcctcagtttcctcatcg

SEQ ID NO: 11179 - DNA, 20 bp, Artificial Sequence
  Chr12_1 Forward Primer
cccatgtatcccaaaaatgc

SEQ ID NO: 11180 - DNA, 20 bp, Artificial Sequence
  Chr12_1 Forward Primer
gtggccacatgttgctagtg

SEQ ID NO: 11181 - DNA, 20 bp, Artificial Sequence
  Chr12_1 Forward Primer
cagactctcaggccaacacc

SEQ ID NO: 11182 - DNA, 20 bp, Artificial Sequence
  Chr12_1 Forward Primer
gtctctgcatcctctccagc

SEQ ID NO: 11183 - DNA, 20 bp, Artificial Sequence
  Chr12_1 Forward Primer
gggagggccagtgttttatt

SEQ ID NO: 11184 - DNA, 20 bp, Artificial Sequence
  Chr12_1 Forward Primer
ttttgtcctccaagtgtggc

SEQ ID NO: 11185 - DNA, 20 bp, Artificial Sequence
  Chr12_1 Forward Primer
attgccacctgtctcagtcc

SEQ ID NO: 11186 - DNA, 20 bp, Artificial Sequence
  Chr12_1 Forward Primer
tccagccagcagacatgtag

SEQ ID NO: 11187 - DNA, 22 bp, Artificial Sequence
  Chr12_1 Forward Primer
tgaacagaatagggcacatagc

SEQ ID NO: 11188 - DNA, 20 bp, Artificial Sequence
  Chr12_1 Forward Primer
ccggtgtgaatctttggttt

SEQ ID NO: 11189 - DNA, 20 bp, Artificial Sequence
  Chr12_1 Forward Primer
agcactcagaacgcctcatt

SEQ ID NO: 11190 - DNA, 20 bp, Artificial Sequence
  Chr12_1 Forward Primer
tgttgctagtttctggctgc

SEQ ID NO: 11191 - DNA, 18 bp, Artificial Sequence
  Chr12_1 Forward Primer
ttcacatttggcccctgt

SEQ ID NO: 11192 - DNA, 20 bp, Artificial Sequence
  Chr12_1 Forward Primer
cccaacaatcaggcgtaagt

SEQ ID NO: 11193 - DNA, 20 bp, Artificial Sequence
  Chr12_1 Forward Primer
atgctgcatcagaagacagg

SEQ ID NO: 11194 - DNA, 20 bp, Artificial Sequence
  Chr12_1 Forward Primer
gcagacatttcctgcctagc

SEQ ID NO: 11195 - DNA, 20 bp, Artificial Sequence
  Chr12_1 Forward Primer
gccacagggtttagctgaga

SEQ ID NO: 11196 - DNA, 20 bp, Artificial Sequence
  Chr12_1 Forward Primer
tttctccgttttcccatcac

SEQ ID NO: 11197 - DNA, 20 bp, Artificial Sequence
  Chr12_1 Forward Primer
agctgggaggtttcagatca

SEQ ID NO: 11198 - DNA, 20 bp, Artificial Sequence
  Chr12_1 Forward Primer
cagaccttgtaggccgtgtt

SEQ ID NO: 11199 - DNA, 20 bp, Artificial Sequence
  Chr12_1 Forward Primer
tttccacccctccctttatc

SEQ ID NO: 11200 - DNA, 20 bp, Artificial Sequence
  Chr12_1 Forward Primer
tgttcagtctgtctgctgcc

SEQ ID NO: 11201 - DNA, 20 bp, Artificial Sequence
  Chr12_1 Forward Primer
agcctcttttgcttggacag

SEQ ID NO: 11202 - DNA, 20 bp, Artificial Sequence
  Chr12_1 Forward Primer
tgccagggagcctatttaca

SEQ ID NO: 11203 - DNA, 20 bp, Artificial Sequence
  Chr12_1 Forward Primer
aacaggaggatgtgggctta

SEQ ID NO: 11204 - DNA, 20 bp, Artificial Sequence
  Chr12_1 Forward Primer
tacatgtcgcccttctctcc

SEQ ID NO: 11205 - DNA, 20 bp, Artificial Sequence
  Chr12_1 Forward Primer
gtattcccatccccttccat

SEQ ID NO: 11206 - DNA, 20 bp, Artificial Sequence
  Chr12_1 Forward Primer
accctgtatagggcagggac

SEQ ID NO: 11207 - DNA, 20 bp, Artificial Sequence
  Chr12_1 Forward Primer
ctgccctggaggatacagaa

SEQ ID NO: 11208 - DNA, 20 bp, Artificial Sequence
  Chr12_1 Forward Primer
gaggctggaccgttcattag

SEQ ID NO: 11209 - DNA, 20 bp, Artificial Sequence
  Chr12_1 Forward Primer
ctggattttgcttccagctc

SEQ ID NO: 11210 - DNA, 20 bp, Artificial Sequence
  Chr12_1 Forward Primer
gcctctccatttctgctttg

SEQ ID NO: 11211 - DNA, 20 bp, Artificial Sequence
  Chr12_1 Forward Primer
tcccactgctcatcctctct

SEQ ID NO: 11212 - DNA, 20 bp, Artificial Sequence
  Chr12_1 Forward Primer
ctgaggcccagagagagttg

SEQ ID NO: 11213 - DNA, 20 bp, Artificial Sequence
  Chr12_1 Forward Primer
ctgtgtctcagccatgttcg

SEQ ID NO: 11214 - DNA, 21 bp, Artificial Sequence
  Chr12_1 Forward Primer
ttggcattcatgactcctctt

SEQ ID NO: 11215 - DNA, 20 bp, Artificial Sequence
  Chr12_1 Forward Primer
tatgaaagggctaccgggat

SEQ ID NO: 11216 - DNA, 20 bp, Artificial Sequence
  Chr12_1 Forward Primer
tgatggccagtgaagatgag

SEQ ID NO: 11217 - DNA, 20 bp, Artificial Sequence
  Chr12_1 Forward Primer
acaaatgtggctccaagtcc

SEQ ID NO: 11218 - DNA, 20 bp, Artificial Sequence
  Chr12_1 Forward Primer
tttgggagctctgggtctta

SEQ ID NO: 11219 - DNA, 20 bp, Artificial Sequence
  Chr12_1 Forward Primer
agtagcaccggtcatccttg

SEQ ID NO: 11220 - DNA, 20 bp, Artificial Sequence
  Chr12_1 Forward Primer
gaacaagaactgggcctgtc

SEQ ID NO: 11221 - DNA, 20 bp, Artificial Sequence
  Chr12_1 Forward Primer
cctgtctctctgggaagctg

SEQ ID NO: 11222 - DNA, 20 bp, Artificial Sequence
  Chr12_1 Forward Primer
cctgtgagttctcagggacc

SEQ ID NO: 11223 - DNA, 20 bp, Artificial Sequence
  Chr12_1 Forward Primer
tctggtggaaagacctttgg

SEQ ID NO: 11224 - DNA, 20 bp, Artificial Sequence
  Chr12_1 Forward Primer
acactcagcaccctaggcat

SEQ ID NO: 11225 - DNA, 20 bp, Artificial Sequence
  Chr12_1 Forward Primer
cctcatttttgctaggcagc

SEQ ID NO: 11226 - DNA, 20 bp, Artificial Sequence
  Chr12_1 Forward Primer
ggacacaccaatctacggct

SEQ ID NO: 11227 - DNA, 20 bp, Artificial Sequence
  Chr12_1 Forward Primer
cagctgaaaacactgcagga

SEQ ID NO: 11228 - DNA, 20 bp, Artificial Sequence
  Chr12_1 Forward Primer
acctcgtgcttggattatgg

SEQ ID NO: 11229 - DNA, 20 bp, Artificial Sequence
  Chr12_1 Forward Primer
ttttcctcctggttttgtgc

SEQ ID NO: 11230 - DNA, 20 bp, Artificial Sequence
  Chr12_1 Forward Primer
tctaaccccctttacccagc

SEQ ID NO: 11231 - DNA, 20 bp, Artificial Sequence
  Chr12_1 Forward Primer
tcacgttctccctgtgtctg

SEQ ID NO: 11232 - DNA, 19 bp, Artificial Sequence
  Chr12_1 Forward Primer
gtagcagccagcaaagcag

SEQ ID NO: 11233 - DNA, 20 bp, Artificial Sequence
  Chr12_1 Forward Primer
ggggtgttttcactgacgtt

SEQ ID NO: 11234 - DNA, 20 bp, Artificial Sequence
  Chr12_1 Forward Primer
gattgagcctgcagggaata

SEQ ID NO: 11235 - DNA, 20 bp, Artificial Sequence
  Chr12_1 Forward Primer
tctccaagctgtcctttgct

SEQ ID NO: 11236 - DNA, 20 bp, Artificial Sequence
  Chr12_1 Forward Primer
cttgattctgccacgtcctt

SEQ ID NO: 11237 - DNA, 20 bp, Artificial Sequence
  Chr12_1 Forward Primer
catttgggatgaatgtgctg

SEQ ID NO: 11238 - DNA, 20 bp, Artificial Sequence
  Chr12_1 Forward Primer
tctgggttcatttcctttgg

SEQ ID NO: 11239 - DNA, 20 bp, Artificial Sequence
  Chr12_1 Forward Primer
ctccttctgtgctaccctgc

SEQ ID NO: 11240 - DNA, 20 bp, Artificial Sequence
  Chr12_1 Forward Primer
atgcctttctccttcccagt

SEQ ID NO: 11241 - DNA, 20 bp, Artificial Sequence
  Chr12_1 Forward Primer
aactgagcgtccaagagagg

SEQ ID NO: 11242 - DNA, 20 bp, Artificial Sequence
  Chr12_1 Forward Primer
gctgctgctgagacttcctt

SEQ ID NO: 11243 - DNA, 20 bp, Artificial Sequence
  Chr12_1 Forward Primer
aagtgtgtcagctgcgagtg

SEQ ID NO: 11244 - DNA, 21 bp, Artificial Sequence
  Chr12_1 Forward Primer
cagtgatggcttggttgtttt

SEQ ID NO: 11245 - DNA, 20 bp, Artificial Sequence
  Chr12_1 Forward Primer
tcgtgcaggtttctgttctg

SEQ ID NO: 11246 - DNA, 20 bp, Artificial Sequence
  Chr12_1 Forward Primer
tggggatctggttgcttatt

SEQ ID NO: 11247 - DNA, 20 bp, Artificial Sequence
  Chr12_1 Forward Primer
cagtcacctgttcccgtctt

SEQ ID NO: 11248 - DNA, 21 bp, Artificial Sequence
  Chr12_1 Forward Primer
tggcttggtttacaattggtt

SEQ ID NO: 11249 - DNA, 20 bp, Artificial Sequence
  Chr12_1 Reverse Primer
tggacacagggtacgtctga

SEQ ID NO: 11250 - DNA, 20 bp, Artificial Sequence
  Chr12_1 Reverse Primer
ccctcaaagaggaggaaacc

SEQ ID NO: 11251 - DNA, 20 bp, Artificial Sequence
  Chr12_1 Reverse Primer
ttacttactggctgggcagg

SEQ ID NO: 11252 - DNA, 20 bp, Artificial Sequence
  Chr12_1 Reverse Primer
attcagatcccaccacaagc

SEQ ID NO: 11253 - DNA, 20 bp, Artificial Sequence
  Chr12_1 Reverse Primer
gcaggcacttatgtgttcca

SEQ ID NO: 11254 - DNA, 20 bp, Artificial Sequence
  Chr12_1 Reverse Primer
actgggctgtaggctgatgt

SEQ ID NO: 11255 - DNA, 20 bp, Artificial Sequence
  Chr12_1 Reverse Primer
gtgtgaacagaaaaggggga

SEQ ID NO: 11256 - DNA, 20 bp, Artificial Sequence
  Chr12_1 Reverse Primer
tgtggatgagctaaggcgat

SEQ ID NO: 11257 - DNA, 20 bp, Artificial Sequence
  Chr12_1 Reverse Primer
agctacccctgggaaacact

SEQ ID NO: 11258 - DNA, 20 bp, Artificial Sequence
  Chr12_1 Reverse Primer
tcaccaccccataccaaatc

SEQ ID NO: 11259 - DNA, 20 bp, Artificial Sequence
  Chr12_1 Reverse Primer
gtccacactcctgaacccac

SEQ ID NO: 11260 - DNA, 20 bp, Artificial Sequence
  Chr12_1 Reverse Primer
tcgtcaactgaatctcacgg

SEQ ID NO: 11261 - DNA, 20 bp, Artificial Sequence
  Chr12_1 Reverse Primer
gaaggtgagctggcagagac

SEQ ID NO: 11262 - DNA, 20 bp, Artificial Sequence
  Chr12_1 Reverse Primer
catttccccagcagctaaga

SEQ ID NO: 11263 - DNA, 20 bp, Artificial Sequence
  Chr12_1 Reverse Primer
cctggccatggtaagacact

SEQ ID NO: 11264 - DNA, 20 bp, Artificial Sequence
  Chr12_1 Reverse Primer
aatggtttcagcccttctca

SEQ ID NO: 11265 - DNA, 20 bp, Artificial Sequence
  Chr12_1 Reverse Primer
accaggagtaagagcatggc

SEQ ID NO: 11266 - DNA, 20 bp, Artificial Sequence
  Chr12_1 Reverse Primer
tgagctctctgcacaaggaa

SEQ ID NO: 11267 - DNA, 20 bp, Artificial Sequence
  Chr12_1 Reverse Primer
gaggacacaacgggagagag

SEQ ID NO: 11268 - DNA, 20 bp, Artificial Sequence
  Chr12_1 Reverse Primer
ccccaaactcagcaagatgt

SEQ ID NO: 11269 - DNA, 20 bp, Artificial Sequence
  Chr12_1 Reverse Primer
gtgttcatgcatcaccttgg

SEQ ID NO: 11270 - DNA, 18 bp, Artificial Sequence
  Chr12_1 Reverse Primer
gagcctcgtggtggaagg

SEQ ID NO: 11271 - DNA, 20 bp, Artificial Sequence
  Chr12_1 Reverse Primer
gacagacaggtgggcagaat

SEQ ID NO: 11272 - DNA, 21 bp, Artificial Sequence
  Chr12_1 Reverse Primer
ggaggcagcagaaaagtaaga

SEQ ID NO: 11273 - DNA, 20 bp, Artificial Sequence
  Chr12_1 Reverse Primer
tctacccacacccctttcag

SEQ ID NO: 11274 - DNA, 20 bp, Artificial Sequence
  Chr12_1 Reverse Primer
gcttccagtctccaccctaa

SEQ ID NO: 11275 - DNA, 20 bp, Artificial Sequence
  Chr12_1 Reverse Primer
tggctcaaactgaatctgga

SEQ ID NO: 11276 - DNA, 20 bp, Artificial Sequence
  Chr12_1 Reverse Primer
ccatcctttatctgccaagc

SEQ ID NO: 11277 - DNA, 20 bp, Artificial Sequence
  Chr12_1 Reverse Primer
gtggtcatgtgcacgctcta

SEQ ID NO: 11278 - DNA, 20 bp, Artificial Sequence
  Chr12_1 Reverse Primer
caggagccaaagttacctcg

SEQ ID NO: 11279 - DNA, 20 bp, Artificial Sequence
  Chr12_1 Reverse Primer
agtccagcccctacacacag

SEQ ID NO: 11280 - DNA, 20 bp, Artificial Sequence
  Chr12_1 Reverse Primer
ctgaggtctggccaagaaag

SEQ ID NO: 11281 - DNA, 20 bp, Artificial Sequence
  Chr12_1 Reverse Primer
tgaaaagctccccagatgtc

SEQ ID NO: 11282 - DNA, 20 bp, Artificial Sequence
  Chr12_1 Reverse Primer
agtccagccaaatgtaacgg

SEQ ID NO: 11283 - DNA, 20 bp, Artificial Sequence
  Chr12_1 Reverse Primer
actgacaccatgtctgcctg

SEQ ID NO: 11284 - DNA, 20 bp, Artificial Sequence
  Chr12_1 Reverse Primer
cagctagaaggagggctcag

SEQ ID NO: 11285 - DNA, 20 bp, Artificial Sequence
  Chr12_1 Reverse Primer
ttcagggacctgatctccag

SEQ ID NO: 11286 - DNA, 20 bp, Artificial Sequence
  Chr12_1 Reverse Primer
gtaagcaatccccaccacag

SEQ ID NO: 11287 - DNA, 20 bp, Artificial Sequence
  Chr12_1 Reverse Primer
ggctgccctattctgtttca

SEQ ID NO: 11288 - DNA, 20 bp, Artificial Sequence
  Chr12_1 Reverse Primer
gtgccttggaaaacaggaag

SEQ ID NO: 11289 - DNA, 20 bp, Artificial Sequence
  Chr12_1 Reverse Primer
tctgaagagggcttcaagga

SEQ ID NO: 11290 - DNA, 20 bp, Artificial Sequence
  Chr12_1 Reverse Primer
cagactgaaggcatcatgga

SEQ ID NO: 11291 - DNA, 20 bp, Artificial Sequence
  Chr12_1 Reverse Primer
gatggggagtgcacttagga

SEQ ID NO: 11292 - DNA, 20 bp, Artificial Sequence
  Chr12_1 Reverse Primer
aaccatggagcaacgtcttc

SEQ ID NO: 11293 - DNA, 20 bp, Artificial Sequence
  Chr12_1 Reverse Primer
attcacaacgagatccgtcc

SEQ ID NO: 11294 - DNA, 20 bp, Artificial Sequence
  Chr12_1 Reverse Primer
tcatcgtcttaatcaggggg

SEQ ID NO: 11295 - DNA, 19 bp, Artificial Sequence
  Chr12_1 Reverse Primer
acacagggaagcaggaagc

SEQ ID NO: 11296 - DNA, 20 bp, Artificial Sequence
  Chr12_1 Reverse Primer
ctgggattataggcgtgagc

SEQ ID NO: 11297 - DNA, 20 bp, Artificial Sequence
  Chr12_1 Reverse Primer
caatcaagctctgaggaggc

SEQ ID NO: 11298 - DNA, 20 bp, Artificial Sequence
  Chr12_1 Reverse Primer
aatcacagctggtgagaggc

SEQ ID NO: 11299 - DNA, 20 bp, Artificial Sequence
  Chr12_1 Reverse Primer
atcacctctggtcttggctg

SEQ ID NO: 11300 - DNA, 20 bp, Artificial Sequence
  Chr12_1 Reverse Primer
tgactggcaagactctccct

SEQ ID NO: 11301 - DNA, 20 bp, Artificial Sequence
  Chr12_1 Reverse Primer
agttggcaggcttctgaaaa

SEQ ID NO: 11302 - DNA, 20 bp, Artificial Sequence
  Chr12_1 Reverse Primer
ggaaaatcctctgagtggca

SEQ ID NO: 11303 - DNA, 20 bp, Artificial Sequence
  Chr12_1 Reverse Primer
cttctaagtgggtcccctcc

SEQ ID NO: 11304 - DNA, 20 bp, Artificial Sequence
  Chr12_1 Reverse Primer
ttctgctgtgcatcaccttc

SEQ ID NO: 11305 - DNA, 20 bp, Artificial Sequence
  Chr12_1 Reverse Primer
acttgccaacctaccacgac

SEQ ID NO: 11306 - DNA, 20 bp, Artificial Sequence
  Chr12_1 Reverse Primer
cagagaggcatttcctgagc

SEQ ID NO: 11307 - DNA, 20 bp, Artificial Sequence
  Chr12_1 Reverse Primer
ctcccccgtgaaataagaca

SEQ ID NO: 11308 - DNA, 20 bp, Artificial Sequence
  Chr12_1 Reverse Primer
tccaatgatgcagcagattc

SEQ ID NO: 11309 - DNA, 22 bp, Artificial Sequence
  Chr12_1 Reverse Primer
tgaccaaatgagagcgtttaga

SEQ ID NO: 11310 - DNA, 20 bp, Artificial Sequence
  Chr12_1 Reverse Primer
gaaaggcagcgttactgctt

SEQ ID NO: 11311 - DNA, 20 bp, Artificial Sequence
  Chr12_1 Reverse Primer
agtctcaaaaggggaatggg

SEQ ID NO: 11312 - DNA, 20 bp, Artificial Sequence
  Chr12_1 Reverse Primer
gataagcccaatctccaggg

SEQ ID NO: 11313 - DNA, 20 bp, Artificial Sequence
  Chr12_1 Reverse Primer
gcaggtgtggtctaaggctc

SEQ ID NO: 11314 - DNA, 20 bp, Artificial Sequence
  Chr12_1 Reverse Primer
ctgagctaaacggtggaacg

SEQ ID NO: 11315 - DNA, 20 bp, Artificial Sequence
  Chr12_1 Reverse Primer
gaaggcacagattttggctc

SEQ ID NO: 11316 - DNA, 20 bp, Artificial Sequence
  Chr12_1 Reverse Primer
atgcagcacttcacaagcaa

SEQ ID NO: 11317 - DNA, 20 bp, Artificial Sequence
  Chr12_1 Reverse Primer
aatgccacatgagatcacca

SEQ ID NO: 11318 - DNA, 20 bp, Artificial Sequence
  Chr12_1 Reverse Primer
gggcttcttccactcctctc

SEQ ID NO: 11319 - DNA, 20 bp, Artificial Sequence
  Chr12_1 Reverse Primer
ttttcccaggctgtcatacc

SEQ ID NO: 11320 - DNA, 20 bp, Artificial Sequence
  Chr12_1 Reverse Primer
cccaccctgacacctgatac

SEQ ID NO: 11321 - DNA, 20 bp, Artificial Sequence
  Chr12_1 Reverse Primer
ctcacagcaacccagtgaga

SEQ ID NO: 11322 - DNA, 20 bp, Artificial Sequence
  Chr12_1 Reverse Primer
ttatctacgccacgcacatc

SEQ ID NO: 11323 - DNA, 20 bp, Artificial Sequence
  Chr12_1 Reverse Primer
agacgcagatgcaatgctta

SEQ ID NO: 11324 - DNA, 20 bp, Artificial Sequence
  Chr12_1 Reverse Primer
tgaggacatgagggtgacaa

SEQ ID NO: 11325 - DNA, 20 bp, Artificial Sequence
  Chr12_1 Reverse Primer
tgaatgagagaggggacagc

SEQ ID NO: 11326 - DNA, 20 bp, Artificial Sequence
  Chr12_1 Reverse Primer
ctacgagtgcagaaccacca

SEQ ID NO: 11327 - DNA, 20 bp, Artificial Sequence
  Chr12_1 Reverse Primer
cagctctgtcccactttcgt

SEQ ID NO: 11328 - DNA, 20 bp, Artificial Sequence
  Chr12_1 Reverse Primer
aaaacagcatgaccctgacc

SEQ ID NO: 11329 - DNA, 20 bp, Artificial Sequence
  Chr12_1 Reverse Primer
atgcctccaaagctgaagaa

SEQ ID NO: 11330 - DNA, 20 bp, Artificial Sequence
  Chr12_1 Reverse Primer
agacaaggcagaggcacagt

SEQ ID NO: 11331 - DNA, 20 bp, Artificial Sequence
  Chr12_1 Reverse Primer
aagagtctagcgggtggtca

SEQ ID NO: 11332 - DNA, 27 bp, Artificial Sequence
  Chr12_1 Reverse Primer
aaaaatacacaaaaacaaactctttca

SEQ ID NO: 11333 - DNA, 20 bp, Artificial Sequence
  Chr12_1 Reverse Primer
tctgtctcactcccacctcc

SEQ ID NO: 11334 - DNA, 20 bp, Artificial Sequence
  Chr12_1 Reverse Primer
gacaccagaaaggccaggta

SEQ ID NO: 11335 - DNA, 20 bp, Artificial Sequence
  Chr12_1 Reverse Primer
gagccaatgtgggtctgttt

SEQ ID NO: 11336 - DNA, 20 bp, Artificial Sequence
  Chr12_1 Reverse Primer
caatcccagaacctagcacc

SEQ ID NO: 11337 - DNA, 20 bp, Artificial Sequence
  Chr12_1 Reverse Primer
caacagatgtggacggaatg

SEQ ID NO: 11338 - DNA, 20 bp, Artificial Sequence
  Chr12_1 Reverse Primer
gaaagaccaggcaactcagg

SEQ ID NO: 11339 - DNA, 20 bp, Artificial Sequence
  Chr12_1 Reverse Primer
gctactcaatgctggcaaga

SEQ ID NO: 11340 - DNA, 18 bp, Artificial Sequence
  Chr12_1 Reverse Primer
aagacacggcccagacac

SEQ ID NO: 11341 - DNA, 20 bp, Artificial Sequence
  Chr12_1 Reverse Primer
aagcactgtatggggagtgg

SEQ ID NO: 11342 - DNA, 20 bp, Artificial Sequence
  Chr12_1 Reverse Primer
ccacaaacaatgagccctct

SEQ ID NO: 11343 - DNA, 20 bp, Artificial Sequence
  Chr12_1 Reverse Primer
actcagctgtctgcctcaca

SEQ ID NO: 11344 - DNA, 20 bp, Artificial Sequence
  Chr12_1 Reverse Primer
tggatttaacatgctcgcct

SEQ ID NO: 11345 - DNA, 20 bp, Artificial Sequence
  Chr12_2 Forward Primer
ggctggaactgaattaccca

SEQ ID NO: 11346 - DNA, 20 bp, Artificial Sequence
  Chr12_2 Forward Primer
ggggtgcttctgagtgaaaa

SEQ ID NO: 11347 - DNA, 20 bp, Artificial Sequence
  Chr12_2 Forward Primer
ttgctgtctgttgttcagcc

SEQ ID NO: 11348 - DNA, 20 bp, Artificial Sequence
  Chr12_2 Forward Primer
tggggaattgcaggtatgat

SEQ ID NO: 11349 - DNA, 20 bp, Artificial Sequence
  Chr12_2 Forward Primer
cctgtccaagctctggtttc

SEQ ID NO: 11350 - DNA, 20 bp, Artificial Sequence
  Chr12_2 Forward Primer
aggctgtgacaaggcagact

SEQ ID NO: 11351 - DNA, 20 bp, Artificial Sequence
  Chr12_2 Forward Primer
gtgtctgccaaggaaatgct

SEQ ID NO: 11352 - DNA, 20 bp, Artificial Sequence
  Chr12_2 Forward Primer
ccaaacttaagagtgcccca

SEQ ID NO: 11353 - DNA, 20 bp, Artificial Sequence
  Chr12_2 Forward Primer
ttgaagggaacatatgggga

SEQ ID NO: 11354 - DNA, 20 bp, Artificial Sequence
  Chr12_2 Forward Primer
agtgtattgcccatcttgcc

SEQ ID NO: 11355 - DNA, 20 bp, Artificial Sequence
  Chr12_2 Forward Primer
gaagtgggcttggagaactg

SEQ ID NO: 11356 - DNA, 20 bp, Artificial Sequence
  Chr12_2 Forward Primer
tcctcatgcaaccaggaagt

SEQ ID NO: 11357 - DNA, 20 bp, Artificial Sequence
  Chr12_2 Forward Primer
gaatggggcaatagcacagt

SEQ ID NO: 11358 - DNA, 20 bp, Artificial Sequence
  Chr12_2 Forward Primer
ggagagcactgcctcgatta

SEQ ID NO: 11359 - DNA, 20 bp, Artificial Sequence
  Chr12_2 Forward Primer
cttgggggagtgtttctgag

SEQ ID NO: 11360 - DNA, 20 bp, Artificial Sequence
  Chr12_2 Forward Primer
cagggtgaaagctcaggaac

SEQ ID NO: 11361 - DNA, 20 bp, Artificial Sequence
  Chr12_2 Forward Primer
actgcgggacatttttgttc

SEQ ID NO: 11362 - DNA, 22 bp, Artificial Sequence
  Chr12_2 Forward Primer
tcttggtaacataatgcgttga

SEQ ID NO: 11363 - DNA, 20 bp, Artificial Sequence
  Chr12_2 Forward Primer
gcaggggattttacccattt

SEQ ID NO: 11364 - DNA, 20 bp, Artificial Sequence
  Chr12_2 Forward Primer
tctctgtctgccttccctgt

SEQ ID NO: 11365 - DNA, 20 bp, Artificial Sequence
  Chr12_2 Forward Primer
caactgcagcaaccttctga

SEQ ID NO: 11366 - DNA, 20 bp, Artificial Sequence
  Chr12_2 Forward Primer
ggcacagcagggaataaaaa

SEQ ID NO: 11367 - DNA, 20 bp, Artificial Sequence
  Chr12_2 Forward Primer
gcatgttccaaggacactga

SEQ ID NO: 11368 - DNA, 20 bp, Artificial Sequence
  Chr12_2 Forward Primer
cgtgccaacttctatgctga

SEQ ID NO: 11369 - DNA, 20 bp, Artificial Sequence
  Chr12_2 Forward Primer
gccacagggctatttggtta

SEQ ID NO: 11370 - DNA, 20 bp, Artificial Sequence
  Chr12_2 Forward Primer
gccaaaggcaatcttgaagt

SEQ ID NO: 11371 - DNA, 20 bp, Artificial Sequence
  Chr12_2 Forward Primer
aaattggggaacttcttggg

SEQ ID NO: 11372 - DNA, 20 bp, Artificial Sequence
  Chr12_2 Forward Primer
cgtgtccacatcacttcctg

SEQ ID NO: 11373 - DNA, 20 bp, Artificial Sequence
  Chr12_2 Forward Primer
catctcccaattccgtgagt

SEQ ID NO: 11374 - DNA, 20 bp, Artificial Sequence
  Chr12_2 Forward Primer
cccctaactgctggctactg

SEQ ID NO: 11375 - DNA, 20 bp, Artificial Sequence
  Chr12_2 Forward Primer
attttcatggggttggtgag

SEQ ID NO: 11376 - DNA, 20 bp, Artificial Sequence
  Chr12_2 Forward Primer
tggaagcacaaaagaaggga

SEQ ID NO: 11377 - DNA, 20 bp, Artificial Sequence
  Chr12_2 Forward Primer
cagctcagtctggaaaaggc

SEQ ID NO: 11378 - DNA, 20 bp, Artificial Sequence
  Chr12_2 Forward Primer
cgatatggaagcaggggtaa

SEQ ID NO: 11379 - DNA, 20 bp, Artificial Sequence
  Chr12_2 Forward Primer
ttcacctgaggactgtcacg

SEQ ID NO: 11380 - DNA, 20 bp, Artificial Sequence
  Chr12_2 Forward Primer
cccattccaaagggtctgta

SEQ ID NO: 11381 - DNA, 20 bp, Artificial Sequence
  Chr12_2 Forward Primer
gcaccctgcatagaaattgg

SEQ ID NO: 11382 - DNA, 20 bp, Artificial Sequence
  Chr12_2 Forward Primer
tccttccctcatggaatctg

SEQ ID NO: 11383 - DNA, 20 bp, Artificial Sequence
  Chr12_2 Forward Primer
tcagttcctgagttgggctt

SEQ ID NO: 11384 - DNA, 20 bp, Artificial Sequence
  Chr12_2 Forward Primer
cactaatggagggccagatg

SEQ ID NO: 11385 - DNA, 20 bp, Artificial Sequence
  Chr12_2 Forward Primer
atgactgacaggggtggcta

SEQ ID NO: 11386 - DNA, 22 bp, Artificial Sequence
  Chr12_2 Forward Primer
gcagaagaagtgaacagagtgg

SEQ ID NO: 11387 - DNA, 20 bp, Artificial Sequence
  Chr12_2 Forward Primer
tgggaaagccagtgaagtct

SEQ ID NO: 11388 - DNA, 20 bp, Artificial Sequence
  Chr12_2 Forward Primer
tcccacctgtaccttggcta

SEQ ID NO: 11389 - DNA, 20 bp, Artificial Sequence
  Chr12_2 Forward Primer
tgtggcgacatcagaagtgt

SEQ ID NO: 11390 - DNA, 21 bp, Artificial Sequence
  Chr12_2 Forward Primer
tcctgtagagcctttgaagca

SEQ ID NO: 11391 - DNA, 27 bp, Artificial Sequence
  Chr12_2 Forward Primer
ttttagcttgtgttagtaaaaggattc

SEQ ID NO: 11392 - DNA, 20 bp, Artificial Sequence
  Chr12_2 Forward Primer
gtccagcttgactttggagg

SEQ ID NO: 11393 - DNA, 20 bp, Artificial Sequence
  Chr12_2 Forward Primer
agggcaaatcccagaaagat

SEQ ID NO: 11394 - DNA, 20 bp, Artificial Sequence
  Chr12_2 Forward Primer
aatgtgggtgctggtttctt

SEQ ID NO: 11395 - DNA, 20 bp, Artificial Sequence
  Chr12_2 Forward Primer
atcccctgaatgtgaattgc

SEQ ID NO: 11396 - DNA, 20 bp, Artificial Sequence
  Chr12_2 Forward Primer
cccttgttcactgggaagtc

SEQ ID NO: 11397 - DNA, 20 bp, Artificial Sequence
  Chr12_2 Forward Primer
accatggaaagttgagccac

SEQ ID NO: 11398 - DNA, 20 bp, Artificial Sequence
  Chr12_2 Forward Primer
caagagacggatgttggctt

SEQ ID NO: 11399 - DNA, 20 bp, Artificial Sequence
  Chr12_2 Forward Primer
tagctggtcaaaggacccac

SEQ ID NO: 11400 - DNA, 20 bp, Artificial Sequence
  Chr12_2 Forward Primer
attgatgagttgtcggtgcc

SEQ ID NO: 11401 - DNA, 20 bp, Artificial Sequence
  Chr12_2 Forward Primer
cagatgctgggaggaatcat

SEQ ID NO: 11402 - DNA, 20 bp, Artificial Sequence
  Chr12_2 Forward Primer
ctgggaagctcaggaaacag

SEQ ID NO: 11403 - DNA, 20 bp, Artificial Sequence
  Chr12_2 Forward Primer
cagacttgcaggcttccttc

SEQ ID NO: 11404 - DNA, 22 bp, Artificial Sequence
  Chr12_2 Forward Primer
gaaggaagtgaagaggagagga

SEQ ID NO: 11405 - DNA, 20 bp, Artificial Sequence
  Chr12_2 Forward Primer
atcctcccaagacacactcg

SEQ ID NO: 11406 - DNA, 20 bp, Artificial Sequence
  Chr12_2 Forward Primer
caagttgacagtcgcttgga

SEQ ID NO: 11407 - DNA, 23 bp, Artificial Sequence
  Chr12_2 Forward Primer
tgtcacaactgaaaagtaaccca

SEQ ID NO: 11408 - DNA, 20 bp, Artificial Sequence
  Chr12_2 Forward Primer
aaccaccctctctcactcca

SEQ ID NO: 11409 - DNA, 21 bp, Artificial Sequence
  Chr12_2 Forward Primer
aaactgaataagcggtgagca

SEQ ID NO: 11410 - DNA, 20 bp, Artificial Sequence
  Chr12_2 Forward Primer
ttaattttggggtggttccc

SEQ ID NO: 11411 - DNA, 21 bp, Artificial Sequence
  Chr12_2 Forward Primer
cagctcaaggaggaatttgtg

SEQ ID NO: 11412 - DNA, 20 bp, Artificial Sequence
  Chr12_2 Forward Primer
tctcacctctcttggctggt

SEQ ID NO: 11413 - DNA, 20 bp, Artificial Sequence
  Chr12_2 Forward Primer
cagcccaggtgaatttctct

SEQ ID NO: 11414 - DNA, 20 bp, Artificial Sequence
  Chr12_2 Forward Primer
aaacctgaggaacgcacatc

SEQ ID NO: 11415 - DNA, 21 bp, Artificial Sequence
  Chr12_2 Forward Primer
cctctcccttcgttttgtttc

SEQ ID NO: 11416 - DNA, 20 bp, Artificial Sequence
  Chr12_2 Forward Primer
tgatttccatgcctgcatta

SEQ ID NO: 11417 - DNA, 20 bp, Artificial Sequence
  Chr12_2 Forward Primer
atggcagataggagtgtccg

SEQ ID NO: 11418 - DNA, 20 bp, Artificial Sequence
  Chr12_2 Forward Primer
tgcctcaaatggtgagagtg

SEQ ID NO: 11419 - DNA, 20 bp, Artificial Sequence
  Chr12_2 Forward Primer
ccaggccctgtctactgaag

SEQ ID NO: 11420 - DNA, 21 bp, Artificial Sequence
  Chr12_2 Forward Primer
gcattccaaatgctctttgtg

SEQ ID NO: 11421 - DNA, 20 bp, Artificial Sequence
  Chr12_2 Forward Primer
tggggctattgaaacctttg

SEQ ID NO: 11422 - DNA, 20 bp, Artificial Sequence
  Chr12_2 Forward Primer
agcccctactctccatgtca

SEQ ID NO: 11423 - DNA, 20 bp, Artificial Sequence
  Chr12_2 Forward Primer
ctttccaggggatccttcat

SEQ ID NO: 11424 - DNA, 25 bp, Artificial Sequence
  Chr12_2 Forward Primer
ggcaataagaaatacacaaagatca

SEQ ID NO: 11425 - DNA, 20 bp, Artificial Sequence
  Chr12_2 Forward Primer
cccagttcccctttcctaaa

SEQ ID NO: 11426 - DNA, 20 bp, Artificial Sequence
  Chr12_2 Forward Primer
tttgcaagttattctcgggg

SEQ ID NO: 11427 - DNA, 20 bp, Artificial Sequence
  Chr12_2 Forward Primer
atgccttttcctgctagggt

SEQ ID NO: 11428 - DNA, 21 bp, Artificial Sequence
  Chr12_2 Forward Primer
aggcgccaatgtataatcagt

SEQ ID NO: 11429 - DNA, 20 bp, Artificial Sequence
  Chr12_2 Forward Primer
tctgcactccaagtcccttt

SEQ ID NO: 11430 - DNA, 20 bp, Artificial Sequence
  Chr12_2 Forward Primer
tttagtttccactgcctgcc

SEQ ID NO: 11431 - DNA, 20 bp, Artificial Sequence
  Chr12_2 Forward Primer
ggcccaggaattggtaattt

SEQ ID NO: 11432 - DNA, 20 bp, Artificial Sequence
  Chr12_2 Forward Primer
ccaaatgagttgcttcggat

SEQ ID NO: 11433 - DNA, 20 bp, Artificial Sequence
  Chr12_2 Forward Primer
cgctatctcctcgtcgtttc

SEQ ID NO: 11434 - DNA, 20 bp, Artificial Sequence
  Chr12_2 Forward Primer
ggattgtttcatgtagccca

SEQ ID NO: 11435 - DNA, 20 bp, Artificial Sequence
  Chr12_2 Forward Primer
gcttgagtcactgtttggca

SEQ ID NO: 11436 - DNA, 20 bp, Artificial Sequence
  Chr12_2 Forward Primer
aaagagggcctccgaaatta

SEQ ID NO: 11437 - DNA, 21 bp, Artificial Sequence
  Chr12_2 Forward Primer
cctttcattgtaatttgggca

SEQ ID NO: 11438 - DNA, 20 bp, Artificial Sequence
  Chr12_2 Forward Primer
tttatgacaccacaaggcca

SEQ ID NO: 11439 - DNA, 20 bp, Artificial Sequence
  Chr12_2 Forward Primer
tcctggaaaggtttgtttgc

SEQ ID NO: 11440 - DNA, 20 bp, Artificial Sequence
  Chr12_2 Forward Primer
tgtgtccaaacagccttctg

SEQ ID NO: 11441 - DNA, 20 bp, Artificial Sequence
  Chr12_2 Reverse Primer
ccagtcaacaagcctcaaca

SEQ ID NO: 11442 - DNA, 20 bp, Artificial Sequence
  Chr12_2 Reverse Primer
tccaacaaagaagggctcac

SEQ ID NO: 11443 - DNA, 20 bp, Artificial Sequence
  Chr12_2 Reverse Primer
caaggtctcgaacaccgtct

SEQ ID NO: 11444 - DNA, 18 bp, Artificial Sequence
  Chr12_2 Reverse Primer
ccatgaggctgccagaga

SEQ ID NO: 11445 - DNA, 23 bp, Artificial Sequence
  Chr12_2 Reverse Primer
ctttgtatcagcctgttctgttg

SEQ ID NO: 11446 - DNA, 20 bp, Artificial Sequence
  Chr12_2 Reverse Primer
agctctgaaaaacgcttcca

SEQ ID NO: 11447 - DNA, 24 bp, Artificial Sequence
  Chr12_2 Reverse Primer
ccattctacataatttcacctcca

SEQ ID NO: 11448 - DNA, 20 bp, Artificial Sequence
  Chr12_2 Reverse Primer
gttcgggtccactttgagac

SEQ ID NO: 11449 - DNA, 20 bp, Artificial Sequence
  Chr12_2 Reverse Primer
ggcacagagtaagagtgggc

SEQ ID NO: 11450 - DNA, 21 bp, Artificial Sequence
  Chr12_2 Reverse Primer
ttatacaggttcctggggtcc

SEQ ID NO: 11451 - DNA, 20 bp, Artificial Sequence
  Chr12_2 Reverse Primer
aatgaaatggatcgcctcac

SEQ ID NO: 11452 - DNA, 20 bp, Artificial Sequence
  Chr12_2 Reverse Primer
ctttggctgcaaaaacagaa

SEQ ID NO: 11453 - DNA, 21 bp, Artificial Sequence
  Chr12_2 Reverse Primer
tcttttggggtagagtcacca

SEQ ID NO: 11454 - DNA, 20 bp, Artificial Sequence
  Chr12_2 Reverse Primer
tcccattgcctcactagagc

SEQ ID NO: 11455 - DNA, 20 bp, Artificial Sequence
  Chr12_2 Reverse Primer
gaggaccaatcagattccca

SEQ ID NO: 11456 - DNA, 20 bp, Artificial Sequence
  Chr12_2 Reverse Primer
gcctgaccagatgggtctaa

SEQ ID NO: 11457 - DNA, 20 bp, Artificial Sequence
  Chr12_2 Reverse Primer
ccagcccaaccaaacttaga

SEQ ID NO: 11458 - DNA, 21 bp, Artificial Sequence
  Chr12_2 Reverse Primer
ttgcttctgtcaaaatgatgc

SEQ ID NO: 11459 - DNA, 20 bp, Artificial Sequence
  Chr12_2 Reverse Primer
agaggttgccaatgagcttg

SEQ ID NO: 11460 - DNA, 20 bp, Artificial Sequence
  Chr12_2 Reverse Primer
ttcatgccccaccattatct

SEQ ID NO: 11461 - DNA, 20 bp, Artificial Sequence
  Chr12_2 Reverse Primer
gcactggccccagatataag

SEQ ID NO: 11462 - DNA, 20 bp, Artificial Sequence
  Chr12_2 Reverse Primer
ccccaccaagagatttcaga

SEQ ID NO: 11463 - DNA, 20 bp, Artificial Sequence
  Chr12_2 Reverse Primer
tctcagggaacaatgtgcaa

SEQ ID NO: 11464 - DNA, 20 bp, Artificial Sequence
  Chr12_2 Reverse Primer
tctgcacatacaacccctga

SEQ ID NO: 11465 - DNA, 20 bp, Artificial Sequence
  Chr12_2 Reverse Primer
ggctgaaactcagcatctcc

SEQ ID NO: 11466 - DNA, 20 bp, Artificial Sequence
  Chr12_2 Reverse Primer
ctccctcctgctcagtgtct

SEQ ID NO: 11467 - DNA, 20 bp, Artificial Sequence
  Chr12_2 Reverse Primer
tggcatatggacctagggaa

SEQ ID NO: 11468 - DNA, 20 bp, Artificial Sequence
  Chr12_2 Reverse Primer
acacgctgcgcttttaagat

SEQ ID NO: 11469 - DNA, 20 bp, Artificial Sequence
  Chr12_2 Reverse Primer
gctaaaaggcaaaggtgtgg

SEQ ID NO: 11470 - DNA, 20 bp, Artificial Sequence
  Chr12_2 Reverse Primer
ttccttcagtctcagggcat

SEQ ID NO: 11471 - DNA, 20 bp, Artificial Sequence
  Chr12_2 Reverse Primer
ccccattatctgtggaccat

SEQ ID NO: 11472 - DNA, 20 bp, Artificial Sequence
  Chr12_2 Reverse Primer
tgatcatcaccctcaatcca

SEQ ID NO: 11473 - DNA, 20 bp, Artificial Sequence
  Chr12_2 Reverse Primer
tctcaacacatccccacaaa

SEQ ID NO: 11474 - DNA, 20 bp, Artificial Sequence
  Chr12_2 Reverse Primer
ctatgtggggatgggacttg

SEQ ID NO: 11475 - DNA, 20 bp, Artificial Sequence
  Chr12_2 Reverse Primer
ctgggactcaccctctgaag

SEQ ID NO: 11476 - DNA, 20 bp, Artificial Sequence
  Chr12_2 Reverse Primer
taaatcaatgccctggcaaa

SEQ ID NO: 11477 - DNA, 20 bp, Artificial Sequence
  Chr12_2 Reverse Primer
agactagcaggcagcagagg

SEQ ID NO: 11478 - DNA, 20 bp, Artificial Sequence
  Chr12_2 Reverse Primer
ttccccgtgtatcccaataa

SEQ ID NO: 11479 - DNA, 20 bp, Artificial Sequence
  Chr12_2 Reverse Primer
gagaggggtttggttcaaca

SEQ ID NO: 11480 - DNA, 20 bp, Artificial Sequence
  Chr12_2 Reverse Primer
gaaagttccccattctgcct

SEQ ID NO: 11481 - DNA, 20 bp, Artificial Sequence
  Chr12_2 Reverse Primer
ccagaaaggcccagaaactt

SEQ ID NO: 11482 - DNA, 20 bp, Artificial Sequence
  Chr12_2 Reverse Primer
gggattaatgcagggactga

SEQ ID NO: 11483 - DNA, 20 bp, Artificial Sequence
  Chr12_2 Reverse Primer
ggccctcaacatcagaggta

SEQ ID NO: 11484 - DNA, 21 bp, Artificial Sequence
  Chr12_2 Reverse Primer
gacttggtcagagatgggtca

SEQ ID NO: 11485 - DNA, 20 bp, Artificial Sequence
  Chr12_2 Reverse Primer
aatggttgcatcctggactc

SEQ ID NO: 11486 - DNA, 20 bp, Artificial Sequence
  Chr12_2 Reverse Primer
agcagttttccatccgctaa

SEQ ID NO: 11487 - DNA, 21 bp, Artificial Sequence
  Chr12_2 Reverse Primer
aaacaaaatttgccttcagga

SEQ ID NO: 11488 - DNA, 20 bp, Artificial Sequence
  Chr12_2 Reverse Primer
cagagaaccaggttatgccc

SEQ ID NO: 11489 - DNA, 20 bp, Artificial Sequence
  Chr12_2 Reverse Primer
ttcctcaattttcagccacc

SEQ ID NO: 11490 - DNA, 20 bp, Artificial Sequence
  Chr12_2 Reverse Primer
gggagggtgtttaagggaaa

SEQ ID NO: 11491 - DNA, 20 bp, Artificial Sequence
  Chr12_2 Reverse Primer
aatgccacccatctacttgc

SEQ ID NO: 11492 - DNA, 20 bp, Artificial Sequence
  Chr12_2 Reverse Primer
agtgtcctgcatccacacag

SEQ ID NO: 11493 - DNA, 20 bp, Artificial Sequence
  Chr12_2 Reverse Primer
cccacatctcacacatccag

SEQ ID NO: 11494 - DNA, 20 bp, Artificial Sequence
  Chr12_2 Reverse Primer
atcagcccatccactctgtc

SEQ ID NO: 11495 - DNA, 20 bp, Artificial Sequence
  Chr12_2 Reverse Primer
ttgtgcatttgtccctagca

SEQ ID NO: 11496 - DNA, 20 bp, Artificial Sequence
  Chr12_2 Reverse Primer
agggcatgtgtgtgtgtgtt

SEQ ID NO: 11497 - DNA, 20 bp, Artificial Sequence
  Chr12_2 Reverse Primer
ctcctctcccacccattaca

SEQ ID NO: 11498 - DNA, 20 bp, Artificial Sequence
  Chr12_2 Reverse Primer
attcttggcattaacggctg

SEQ ID NO: 11499 - DNA, 20 bp, Artificial Sequence
  Chr12_2 Reverse Primer
aagagagcgacagcaaccat

SEQ ID NO: 11500 - DNA, 20 bp, Artificial Sequence
  Chr12_2 Reverse Primer
gcagttgcctctttacctgg

SEQ ID NO: 11501 - DNA, 20 bp, Artificial Sequence
  Chr12_2 Reverse Primer
ctgaacctttgtagccccag

SEQ ID NO: 11502 - DNA, 20 bp, Artificial Sequence
  Chr12_2 Reverse Primer
agtcttcgggaaatgtggtg

SEQ ID NO: 11503 - DNA, 20 bp, Artificial Sequence
  Chr12_2 Reverse Primer
ctggagggcttgagtctttg

SEQ ID NO: 11504 - DNA, 20 bp, Artificial Sequence
  Chr12_2 Reverse Primer
gctccctcttcctctggttt

SEQ ID NO: 11505 - DNA, 21 bp, Artificial Sequence
  Chr12_2 Reverse Primer
tcttctcaaatctccccaaca

SEQ ID NO: 11506 - DNA, 20 bp, Artificial Sequence
  Chr12_2 Reverse Primer
tgcaaaaacagaacagcagg

SEQ ID NO: 11507 - DNA, 20 bp, Artificial Sequence
  Chr12_2 Reverse Primer
actctccgatttggagggaa

SEQ ID NO: 11508 - DNA, 20 bp, Artificial Sequence
  Chr12_2 Reverse Primer
cattcacccaggcattcttt

SEQ ID NO: 11509 - DNA, 20 bp, Artificial Sequence
  Chr12_2 Reverse Primer
gccacttagcactgctccat

SEQ ID NO: 11510 - DNA, 20 bp, Artificial Sequence
  Chr12_2 Reverse Primer
cttcctggccccaaagtatt

SEQ ID NO: 11511 - DNA, 20 bp, Artificial Sequence
  Chr12_2 Reverse Primer
tccgtccagtgtccttctct

SEQ ID NO: 11512 - DNA, 20 bp, Artificial Sequence
  Chr12_2 Reverse Primer
cagtgtccctggatggagat

SEQ ID NO: 11513 - DNA, 20 bp, Artificial Sequence
  Chr12_2 Reverse Primer
gagaaaaatgtcagaggcgg

SEQ ID NO: 11514 - DNA, 20 bp, Artificial Sequence
  Chr12_2 Reverse Primer
gcagcaatccaccttctctc

SEQ ID NO: 11515 - DNA, 20 bp, Artificial Sequence
  Chr12_2 Reverse Primer
gcagcttgaaatcttggagg

SEQ ID NO: 11516 - DNA, 20 bp, Artificial Sequence
  Chr12_2 Reverse Primer
ctcttttatcctccaggccc

SEQ ID NO: 11517 - DNA, 20 bp, Artificial Sequence
  Chr12_2 Reverse Primer
ggttcctctccactgaccaa

SEQ ID NO: 11518 - DNA, 20 bp, Artificial Sequence
  Chr12_2 Reverse Primer
cagcaactaaccatgggctt

SEQ ID NO: 11519 - DNA, 20 bp, Artificial Sequence
  Chr12_2 Reverse Primer
tgcactgtcttagtccctgg

SEQ ID NO: 11520 - DNA, 20 bp, Artificial Sequence
  Chr12_2 Reverse Primer
ctttcctcctcccagatgct

SEQ ID NO: 11521 - DNA, 21 bp, Artificial Sequence
  Chr12_2 Reverse Primer
tgaatgctgaggtcacaaaag

SEQ ID NO: 11522 - DNA, 20 bp, Artificial Sequence
  Chr12_2 Reverse Primer
ttccttgtgtctctccctgg

SEQ ID NO: 11523 - DNA, 20 bp, Artificial Sequence
  Chr12_2 Reverse Primer
tgatctaagggcccaagtgt

SEQ ID NO: 11524 - DNA, 20 bp, Artificial Sequence
  Chr12_2 Reverse Primer
ggttcttccagacaagctgc

SEQ ID NO: 11525 - DNA, 20 bp, Artificial Sequence
  Chr12_2 Reverse Primer
attggcaagctctctggtgt

SEQ ID NO: 11526 - DNA, 20 bp, Artificial Sequence
  Chr12_2 Reverse Primer
cccatggaacaaggaagcta

SEQ ID NO: 11527 - DNA, 20 bp, Artificial Sequence
  Chr12_2 Reverse Primer
tgcctttgattccctaaacg

SEQ ID NO: 11528 - DNA, 19 bp, Artificial Sequence
  Chr12_2 Reverse Primer
gccaatgcaaccgtaaaaa

SEQ ID NO: 11529 - DNA, 20 bp, Artificial Sequence
  Chr12_2 Reverse Primer
tatagggagtggctggatgc

SEQ ID NO: 11530 - DNA, 20 bp, Artificial Sequence
  Chr12_2 Reverse Primer
cactgttctggggtggaaag

SEQ ID NO: 11531 - DNA, 20 bp, Artificial Sequence
  Chr12_2 Reverse Primer
ggtggagtgagtaggggaca

SEQ ID NO: 11532 - DNA, 20 bp, Artificial Sequence
  Chr12_2 Reverse Primer
gatgctgggctctgatgttt

SEQ ID NO: 11533 - DNA, 20 bp, Artificial Sequence
  Chr12_2 Reverse Primer
tattcctgcggaggtcatct

SEQ ID NO: 11534 - DNA, 20 bp, Artificial Sequence
  Chr12_2 Reverse Primer
cagcattcacgcttgtcatt

SEQ ID NO: 11535 - DNA, 20 bp, Artificial Sequence
  Chr12_2 Reverse Primer
cacgagagaggcacatgcta

SEQ ID NO: 11536 - DNA, 20 bp, Artificial Sequence
  Chr12_2 Reverse Primer
ttctgcgctttgctcattta

SEQ ID NO: 11537 - DNA, 20 bp, Artificial Sequence
  Chr12_3 Forward Primer
ttcaagaaaatgggcaaggt

SEQ ID NO: 11538 - DNA, 20 bp, Artificial Sequence
  Chr12_3 Forward Primer
cagtgggttatccctgagga

SEQ ID NO: 11539 - DNA, 24 bp, Artificial Sequence
  Chr12_3 Forward Primer
cctagaatccttataaatcacccg

SEQ ID NO: 11540 - DNA, 20 bp, Artificial Sequence
  Chr12_3 Forward Primer
ccctgttctgcccttaatga

SEQ ID NO: 11541 - DNA, 20 bp, Artificial Sequence
  Chr12_3 Forward Primer
ggtataatccccgcacacac

SEQ ID NO: 11542 - DNA, 20 bp, Artificial Sequence
  Chr12_3 Forward Primer
ctcctctgcgttttcatcgt

SEQ ID NO: 11543 - DNA, 20 bp, Artificial Sequence
  Chr12_3 Forward Primer
gtcacaaaagcctaagccgt

SEQ ID NO: 11544 - DNA, 20 bp, Artificial Sequence
  Chr12_3 Forward Primer
caggtggaagggaatcaaga

SEQ ID NO: 11545 - DNA, 23 bp, Artificial Sequence
  Chr12_3 Forward Primer
tcagagagagagagagaagcaaa

SEQ ID NO: 11546 - DNA, 20 bp, Artificial Sequence
  Chr12_3 Forward Primer
agtagcccagagggtggagt

SEQ ID NO: 11547 - DNA, 22 bp, Artificial Sequence
  Chr12_3 Forward Primer
agcaagtctgaacacactggag

SEQ ID NO: 11548 - DNA, 25 bp, Artificial Sequence
  Chr12_3 Forward Primer
tgtaaaaaggacaagtgatgacaaa

SEQ ID NO: 11549 - DNA, 20 bp, Artificial Sequence
  Chr12_3 Forward Primer
tacacttccaggcctgcttc

SEQ ID NO: 11550 - DNA, 20 bp, Artificial Sequence
  Chr12_3 Forward Primer
cgcagggtaaggaagaatca

SEQ ID NO: 11551 - DNA, 22 bp, Artificial Sequence
  Chr12_3 Forward Primer
tgtgtctttctttcacaccaca

SEQ ID NO: 11552 - DNA, 20 bp, Artificial Sequence
  Chr12_3 Forward Primer
tttgaagggatcacagtgga

SEQ ID NO: 11553 - DNA, 24 bp, Artificial Sequence
  Chr12_3 Forward Primer
gcctttcctagtctgtagtgatgg

SEQ ID NO: 11554 - DNA, 20 bp, Artificial Sequence
  Chr12_3 Forward Primer
ggcccaatgtaactgaagga

SEQ ID NO: 11555 - DNA, 20 bp, Artificial Sequence
  Chr12_3 Forward Primer
tgattttggctgcctttatg

SEQ ID NO: 11556 - DNA, 21 bp, Artificial Sequence
  Chr12_3 Forward Primer
gggcacattcattcacataca

SEQ ID NO: 11557 - DNA, 20 bp, Artificial Sequence
  Chr12_3 Forward Primer
gtccatttcagtggagagcg

SEQ ID NO: 11558 - DNA, 19 bp, Artificial Sequence
  Chr12_3 Forward Primer
gcctagggtgcaagaggag

SEQ ID NO: 11559 - DNA, 20 bp, Artificial Sequence
  Chr12_3 Forward Primer
tcaggagcgttcatttgaga

SEQ ID NO: 11560 - DNA, 20 bp, Artificial Sequence
  Chr12_3 Forward Primer
tcagctgaaatgcctccttt

SEQ ID NO: 11561 - DNA, 21 bp, Artificial Sequence
  Chr12_3 Forward Primer
tggatgagagtgaaggaagga

SEQ ID NO: 11562 - DNA, 20 bp, Artificial Sequence
  Chr12_3 Forward Primer
tgcacaagacagtccctgat

SEQ ID NO: 11563 - DNA, 20 bp, Artificial Sequence
  Chr12_3 Forward Primer
aattagcagcagagccagga

SEQ ID NO: 11564 - DNA, 21 bp, Artificial Sequence
  Chr12_3 Forward Primer
ttttggaaaggatttcctacg

SEQ ID NO: 11565 - DNA, 20 bp, Artificial Sequence
  Chr12_3 Forward Primer
atgcaatggaagtgatgctg

SEQ ID NO: 11566 - DNA, 20 bp, Artificial Sequence
  Chr12_3 Forward Primer
ttcatttgattccagccctc

SEQ ID NO: 11567 - DNA, 20 bp, Artificial Sequence
  Chr12_3 Forward Primer
tggaaaggagagtttggcac

SEQ ID NO: 11568 - DNA, 20 bp, Artificial Sequence
  Chr12_3 Forward Primer
aaaacctcaaaaccctgcct

SEQ ID NO: 11569 - DNA, 20 bp, Artificial Sequence
  Chr12_3 Forward Primer
tagcgtcccctttgtgattc

SEQ ID NO: 11570 - DNA, 20 bp, Artificial Sequence
  Chr12_3 Forward Primer
atacgcaacccctgaaaatg

SEQ ID NO: 11571 - DNA, 22 bp, Artificial Sequence
  Chr12_3 Forward Primer
tccagtagatgaagcagtccag

SEQ ID NO: 11572 - DNA, 21 bp, Artificial Sequence
  Chr12_3 Forward Primer
caccttctgtgaaaggtgcat

SEQ ID NO: 11573 - DNA, 20 bp, Artificial Sequence
  Chr12_3 Forward Primer
aactccttccctccacagaa

SEQ ID NO: 11574 - DNA, 23 bp, Artificial Sequence
  Chr12_3 Forward Primer
tttcttcagctttttgaagcatt

SEQ ID NO: 11575 - DNA, 20 bp, Artificial Sequence
  Chr12_3 Forward Primer
ttccactccttgctccagtt

SEQ ID NO: 11576 - DNA, 20 bp, Artificial Sequence
  Chr12_3 Forward Primer
ggtggctcgattttccatag

SEQ ID NO: 11577 - DNA, 21 bp, Artificial Sequence
  Chr12_3 Forward Primer
cagcacatttatgtggccatt

SEQ ID NO: 11578 - DNA, 25 bp, Artificial Sequence
  Chr12_3 Forward Primer
catctttagcttgattttgtgattt

SEQ ID NO: 11579 - DNA, 27 bp, Artificial Sequence
  Chr12_3 Forward Primer
ttgcccaactatttttatttaatactg

SEQ ID NO: 11580 - DNA, 22 bp, Artificial Sequence
  Chr12_3 Forward Primer
ggtctccatacctgagcatttc

SEQ ID NO: 11581 - DNA, 20 bp, Artificial Sequence
  Chr12_3 Forward Primer
gcaggaatctagcctggaca

SEQ ID NO: 11582 - DNA, 25 bp, Artificial Sequence
  Chr12_3 Forward Primer
acaatggagttaaagagaaaggtga

SEQ ID NO: 11583 - DNA, 20 bp, Artificial Sequence
  Chr12_3 Forward Primer
atgtttctgttgccccatct

SEQ ID NO: 11584 - DNA, 20 bp, Artificial Sequence
  Chr12_3 Forward Primer
gtccgcctggaattgagtaa

SEQ ID NO: 11585 - DNA, 20 bp, Artificial Sequence
  Chr12_3 Forward Primer
gggagatgccagtggactac

SEQ ID NO: 11586 - DNA, 20 bp, Artificial Sequence
  Chr12_3 Forward Primer
catatttgcacaaaggggct

SEQ ID NO: 11587 - DNA, 20 bp, Artificial Sequence
  Chr12_3 Forward Primer
agggaggacgtgacactttg

SEQ ID NO: 11588 - DNA, 20 bp, Artificial Sequence
  Chr12_3 Forward Primer
agcaattgttgctgcctctt

SEQ ID NO: 11589 - DNA, 25 bp, Artificial Sequence
  Chr12_3 Forward Primer
tgagtccaacaaattatgtcttacg

SEQ ID NO: 11590 - DNA, 20 bp, Artificial Sequence
  Chr12_3 Forward Primer
gcacaaacaaaaacttgggc

SEQ ID NO: 11591 - DNA, 20 bp, Artificial Sequence
  Chr12_3 Forward Primer
caaatgcttgggcagaaaat

SEQ ID NO: 11592 - DNA, 22 bp, Artificial Sequence
  Chr12_3 Forward Primer
ccaacttatttgttgtgccaga

SEQ ID NO: 11593 - DNA, 20 bp, Artificial Sequence
  Chr12_3 Forward Primer
agcgagagctgactgacaca

SEQ ID NO: 11594 - DNA, 20 bp, Artificial Sequence
  Chr12_3 Forward Primer
ttttgcacattctctgtgcc

SEQ ID NO: 11595 - DNA, 20 bp, Artificial Sequence
  Chr12_3 Forward Primer
taaatttgccgatgcacact

SEQ ID NO: 11596 - DNA, 25 bp, Artificial Sequence
  Chr12_3 Forward Primer
tgaacatcagatatataaacgcaca

SEQ ID NO: 11597 - DNA, 20 bp, Artificial Sequence
  Chr12_3 Forward Primer
cctctctgccttctgcctaa

SEQ ID NO: 11598 - DNA, 20 bp, Artificial Sequence
  Chr12_3 Forward Primer
gtaagaagcgttgtgggcat

SEQ ID NO: 11599 - DNA, 22 bp, Artificial Sequence
  Chr12_3 Forward Primer
atccccattctaactttttcca

SEQ ID NO: 11600 - DNA, 20 bp, Artificial Sequence
  Chr12_3 Forward Primer
aggaaagctgtgccattcag

SEQ ID NO: 11601 - DNA, 20 bp, Artificial Sequence
  Chr12_3 Forward Primer
ggtgagggcaatttgaaaga

SEQ ID NO: 11602 - DNA, 20 bp, Artificial Sequence
  Chr12_3 Forward Primer
tgaagatgttctcctgccaa

SEQ ID NO: 11603 - DNA, 21 bp, Artificial Sequence
  Chr12_3 Forward Primer
tgccttctaggaatgaacagc

SEQ ID NO: 11604 - DNA, 20 bp, Artificial Sequence
  Chr12_3 Forward Primer
ctgctttaactggtctgggg

SEQ ID NO: 11605 - DNA, 20 bp, Artificial Sequence
  Chr12_3 Forward Primer
ccttttcagtttccctgggt

SEQ ID NO: 11606 - DNA, 20 bp, Artificial Sequence
  Chr12_3 Forward Primer
ttcttggctccttagcatgg

SEQ ID NO: 11607 - DNA, 20 bp, Artificial Sequence
  Chr12_3 Forward Primer
aggcaggaacaaaccatgtc

SEQ ID NO: 11608 - DNA, 20 bp, Artificial Sequence
  Chr12_3 Forward Primer
ggcaagaatcaccttgctgt

SEQ ID NO: 11609 - DNA, 20 bp, Artificial Sequence
  Chr12_3 Forward Primer
ttacaccaaatccctccctg

SEQ ID NO: 11610 - DNA, 20 bp, Artificial Sequence
  Chr12_3 Forward Primer
gtcatgggagctgaagaagc

SEQ ID NO: 11611 - DNA, 21 bp, Artificial Sequence
  Chr12_3 Forward Primer
cagctcctgtttgatttgaca

SEQ ID NO: 11612 - DNA, 22 bp, Artificial Sequence
  Chr12_3 Forward Primer
gaggtaggacctttgtttgtca

SEQ ID NO: 11613 - DNA, 20 bp, Artificial Sequence
  Chr12_3 Forward Primer
ttcaagagggaggaatgtgc

SEQ ID NO: 11614 - DNA, 20 bp, Artificial Sequence
  Chr12_3 Forward Primer
gcaagttgcatggacttcac

SEQ ID NO: 11615 - DNA, 20 bp, Artificial Sequence
  Chr12_3 Forward Primer
accaactgagggagcctgta

SEQ ID NO: 11616 - DNA, 20 bp, Artificial Sequence
  Chr12_3 Forward Primer
tgtccgagctgtgttttgtt

SEQ ID NO: 11617 - DNA, 20 bp, Artificial Sequence
  Chr12_3 Forward Primer
aaaaactggccaacagatgc

SEQ ID NO: 11618 - DNA, 20 bp, Artificial Sequence
  Chr12_3 Forward Primer
gcaccgcctaaggaaaagat

SEQ ID NO: 11619 - DNA, 20 bp, Artificial Sequence
  Chr12_3 Forward Primer
ttgtccccatatttgggatg

SEQ ID NO: 11620 - DNA, 20 bp, Artificial Sequence
  Chr12_3 Forward Primer
ttattttgggggtgtttcca

SEQ ID NO: 11621 - DNA, 20 bp, Artificial Sequence
  Chr12_3 Forward Primer
gcaggcatagcatctgtgaa

SEQ ID NO: 11622 - DNA, 20 bp, Artificial Sequence
  Chr12_3 Forward Primer
agctttccttggcctgaaat

SEQ ID NO: 11623 - DNA, 21 bp, Artificial Sequence
  Chr12_3 Forward Primer
cagcttacctgaaggcatttg

SEQ ID NO: 11624 - DNA, 20 bp, Artificial Sequence
  Chr12_3 Forward Primer
gttttccccatcaccagaag

SEQ ID NO: 11625 - DNA, 20 bp, Artificial Sequence
  Chr12_3 Forward Primer
tcagtgattacgcctgcatc

SEQ ID NO: 11626 - DNA, 20 bp, Artificial Sequence
  Chr12_3 Forward Primer
gcccgtgttgctagatcaat

SEQ ID NO: 11627 - DNA, 21 bp, Artificial Sequence
  Chr12_3 Forward Primer
gcattctttccagaaaggtca

SEQ ID NO: 11628 - DNA, 20 bp, Artificial Sequence
  Chr12_3 Forward Primer
gctacccagatgggaatgtg

SEQ ID NO: 11629 - DNA, 20 bp, Artificial Sequence
  Chr12_3 Forward Primer
gcctctacttccatccttgg

SEQ ID NO: 11630 - DNA, 20 bp, Artificial Sequence
  Chr12_3 Forward Primer
gaaattggctggtgtggagt

SEQ ID NO: 11631 - DNA, 20 bp, Artificial Sequence
  Chr12_3 Forward Primer
gtgagccactacaaccagca

SEQ ID NO: 11632 - DNA, 24 bp, Artificial Sequence
  Chr12_3 Forward Primer
catttatggagtgtttagctgttc

SEQ ID NO: 11633 - DNA, 20 bp, Artificial Sequence
  Chr12_3 Reverse Primer
cataagcatccaaggggttg

SEQ ID NO: 11634 - DNA, 20 bp, Artificial Sequence
  Chr12_3 Reverse Primer
atcccagtaatctggcaacg

SEQ ID NO: 11635 - DNA, 22 bp, Artificial Sequence
  Chr12_3 Reverse Primer
gctaaaggatcagaagaaggca

SEQ ID NO: 11636 - DNA, 20 bp, Artificial Sequence
  Chr12_3 Reverse Primer
ggcttgatatcatcgcctgt

SEQ ID NO: 11637 - DNA, 21 bp, Artificial Sequence
  Chr12_3 Reverse Primer
tgggaacttcaacactggatt

SEQ ID NO: 11638 - DNA, 20 bp, Artificial Sequence
  Chr12_3 Reverse Primer
ggggtcctaaaaactacgcc

SEQ ID NO: 11639 - DNA, 20 bp, Artificial Sequence
  Chr12_3 Reverse Primer
ggcttgtcttttcctaccca

SEQ ID NO: 11640 - DNA, 20 bp, Artificial Sequence
  Chr12_3 Reverse Primer
agcgagaaccccaacagtaa

SEQ ID NO: 11641 - DNA, 20 bp, Artificial Sequence
  Chr12_3 Reverse Primer
gtagggcagttttccctcat

SEQ ID NO: 11642 - DNA, 20 bp, Artificial Sequence
  Chr12_3 Reverse Primer
tggggattttcttcccaaat

SEQ ID NO: 11643 - DNA, 21 bp, Artificial Sequence
  Chr12_3 Reverse Primer
aaaagacaggattgcaccaga

SEQ ID NO: 11644 - DNA, 24 bp, Artificial Sequence
  Chr12_3 Reverse Primer
aagatgggaaaaatcatagaatgc

SEQ ID NO: 11645 - DNA, 20 bp, Artificial Sequence
  Chr12_3 Reverse Primer
aagcatgcctcacttcttgg

SEQ ID NO: 11646 - DNA, 20 bp, Artificial Sequence
  Chr12_3 Reverse Primer
tcaacaggcagaatgtgagg

SEQ ID NO: 11647 - DNA, 20 bp, Artificial Sequence
  Chr12_3 Reverse Primer
ggcacacacagatacgcaga

SEQ ID NO: 11648 - DNA, 22 bp, Artificial Sequence
  Chr12_3 Reverse Primer
cggtattccatttacctctgga

SEQ ID NO: 11649 - DNA, 24 bp, Artificial Sequence
  Chr12_3 Reverse Primer
aaggaactctgagaaagaaccaga

SEQ ID NO: 11650 - DNA, 20 bp, Artificial Sequence
  Chr12_3 Reverse Primer
aggggctggaggttttctta

SEQ ID NO: 11651 - DNA, 20 bp, Artificial Sequence
  Chr12_3 Reverse Primer
ggattttccaccaagtgcat

SEQ ID NO: 11652 - DNA, 20 bp, Artificial Sequence
  Chr12_3 Reverse Primer
gatcacctcaattgcatccc

SEQ ID NO: 11653 - DNA, 20 bp, Artificial Sequence
  Chr12_3 Reverse Primer
ggcattaggttccccatctt

SEQ ID NO: 11654 - DNA, 22 bp, Artificial Sequence
  Chr12_3 Reverse Primer
aaagggctgtattcgtaaacca

SEQ ID NO: 11655 - DNA, 20 bp, Artificial Sequence
  Chr12_3 Reverse Primer
attggagagcactggctttg

SEQ ID NO: 11656 - DNA, 20 bp, Artificial Sequence
  Chr12_3 Reverse Primer
tctgtcatagctggcagtgg

SEQ ID NO: 11657 - DNA, 24 bp, Artificial Sequence
  Chr12_3 Reverse Primer
tttaagggtgaagaggacattttt

SEQ ID NO: 11658 - DNA, 20 bp, Artificial Sequence
  Chr12_3 Reverse Primer
tcccagcaacagtttcctct

SEQ ID NO: 11659 - DNA, 20 bp, Artificial Sequence
  Chr12_3 Reverse Primer
aaatctgcagaggtggcact

SEQ ID NO: 11660 - DNA, 21 bp, Artificial Sequence
  Chr12_3 Reverse Primer
tcagcccagattcaagaagaa

SEQ ID NO: 11661 - DNA, 20 bp, Artificial Sequence
  Chr12_3 Reverse Primer
gttggttagccctctccctc

SEQ ID NO: 11662 - DNA, 20 bp, Artificial Sequence
  Chr12_3 Reverse Primer
caggaattaacccaaggcaa

SEQ ID NO: 11663 - DNA, 24 bp, Artificial Sequence
  Chr12_3 Reverse Primer
ttgttccctcagaatctaagactg

SEQ ID NO: 11664 - DNA, 20 bp, Artificial Sequence
  Chr12_3 Reverse Primer
taaaaacagcacgaggagcc

SEQ ID NO: 11665 - DNA, 20 bp, Artificial Sequence
  Chr12_3 Reverse Primer
aatccactccatgcggttac

SEQ ID NO: 11666 - DNA, 20 bp, Artificial Sequence
  Chr12_3 Reverse Primer
caaacccattccaaagccta

SEQ ID NO: 11667 - DNA, 20 bp, Artificial Sequence
  Chr12_3 Reverse Primer
atggggaaagctgtgagtgt

SEQ ID NO: 11668 - DNA, 20 bp, Artificial Sequence
  Chr12_3 Reverse Primer
gggcaaaattactcccatca

SEQ ID NO: 11669 - DNA, 20 bp, Artificial Sequence
  Chr12_3 Reverse Primer
gcacacactgtggccaatta

SEQ ID NO: 11670 - DNA, 21 bp, Artificial Sequence
  Chr12_3 Reverse Primer
tgatggtaattttgtcaggca

SEQ ID NO: 11671 - DNA, 20 bp, Artificial Sequence
  Chr12_3 Reverse Primer
tttttcaggccccattatca

SEQ ID NO: 11672 - DNA, 20 bp, Artificial Sequence
  Chr12_3 Reverse Primer
gtaacctcagcggcaagcta

SEQ ID NO: 11673 - DNA, 20 bp, Artificial Sequence
  Chr12_3 Reverse Primer
tcttcagcagaggtgacagc

SEQ ID NO: 11674 - DNA, 26 bp, Artificial Sequence
  Chr12_3 Reverse Primer
ttcctttaagaaagtttttgcttacc

SEQ ID NO: 11675 - DNA, 20 bp, Artificial Sequence
  Chr12_3 Reverse Primer
tccaaaattcccagaatgga

SEQ ID NO: 11676 - DNA, 20 bp, Artificial Sequence
  Chr12_3 Reverse Primer
aaatcaccaggtttttcccc

SEQ ID NO: 11677 - DNA, 20 bp, Artificial Sequence
  Chr12_3 Reverse Primer
tgcatacattttgcccgtta

SEQ ID NO: 11678 - DNA, 25 bp, Artificial Sequence
  Chr12_3 Reverse Primer
ttcaagaaaatttatgaatcgaatg

SEQ ID NO: 11679 - DNA, 20 bp, Artificial Sequence
  Chr12_3 Reverse Primer
tggcagctctattctgcctt

SEQ ID NO: 11680 - DNA, 20 bp, Artificial Sequence
  Chr12_3 Reverse Primer
atgagacacatggctggaca

SEQ ID NO: 11681 - DNA, 20 bp, Artificial Sequence
  Chr12_3 Reverse Primer
gacagccatgggaaacaatc

SEQ ID NO: 11682 - DNA, 20 bp, Artificial Sequence
  Chr12_3 Reverse Primer
cctgccagtttcttcagctt

SEQ ID NO: 11683 - DNA, 20 bp, Artificial Sequence
  Chr12_3 Reverse Primer
ctccagttgagccgtcagat

SEQ ID NO: 11684 - DNA, 20 bp, Artificial Sequence
  Chr12_3 Reverse Primer
cacactgcttctgagcttgg

SEQ ID NO: 11685 - DNA, 20 bp, Artificial Sequence
  Chr12_3 Reverse Primer
tcaaattgtgccaccactgt

SEQ ID NO: 11686 - DNA, 20 bp, Artificial Sequence
  Chr12_3 Reverse Primer
cagggtttatggacccattg

SEQ ID NO: 11687 - DNA, 20 bp, Artificial Sequence
  Chr12_3 Reverse Primer
ggaatcaacaagcttccagg

SEQ ID NO: 11688 - DNA, 20 bp, Artificial Sequence
  Chr12_3 Reverse Primer
ggaaacagggaaggggtaag

SEQ ID NO: 11689 - DNA, 20 bp, Artificial Sequence
  Chr12_3 Reverse Primer
atttagtgccctgccttcag

SEQ ID NO: 11690 - DNA, 20 bp, Artificial Sequence
  Chr12_3 Reverse Primer
cagcacctacccagggatta

SEQ ID NO: 11691 - DNA, 20 bp, Artificial Sequence
  Chr12_3 Reverse Primer
ccgtgcctattcttgcttct

SEQ ID NO: 11692 - DNA, 20 bp, Artificial Sequence
  Chr12_3 Reverse Primer
cctcttactccctgagtcgc

SEQ ID NO: 11693 - DNA, 20 bp, Artificial Sequence
  Chr12_3 Reverse Primer
caaaccaaggagggtttgaa

SEQ ID NO: 11694 - DNA, 20 bp, Artificial Sequence
  Chr12_3 Reverse Primer
cacacacagacacacacgga

SEQ ID NO: 11695 - DNA, 21 bp, Artificial Sequence
  Chr12_3 Reverse Primer
aatagcttgcaaagctgacca

SEQ ID NO: 11696 - DNA, 20 bp, Artificial Sequence
  Chr12_3 Reverse Primer
atgcattcactcctggcttc

SEQ ID NO: 11697 - DNA, 20 bp, Artificial Sequence
  Chr12_3 Reverse Primer
ctgaaaccccattcagaagc

SEQ ID NO: 11698 - DNA, 20 bp, Artificial Sequence
  Chr12_3 Reverse Primer
aagctgaagtggagagctgg

SEQ ID NO: 11699 - DNA, 19 bp, Artificial Sequence
  Chr12_3 Reverse Primer
atggtcattgccatggttg

SEQ ID NO: 11700 - DNA, 20 bp, Artificial Sequence
  Chr12_3 Reverse Primer
gctgcaggaatcttcaatcc

SEQ ID NO: 11701 - DNA, 20 bp, Artificial Sequence
  Chr12_3 Reverse Primer
tggagaggaaagagcttgga

SEQ ID NO: 11702 - DNA, 20 bp, Artificial Sequence
  Chr12_3 Reverse Primer
ttcccagaagaggcaaaatg

SEQ ID NO: 11703 - DNA, 20 bp, Artificial Sequence
  Chr12_3 Reverse Primer
cagtcatttgctgtttggga

SEQ ID NO: 11704 - DNA, 24 bp, Artificial Sequence
  Chr12_3 Reverse Primer
tgttacagtctcccaaagctaaaa

SEQ ID NO: 11705 - DNA, 22 bp, Artificial Sequence
  Chr12_3 Reverse Primer
gcctattggccaaataagaatg

SEQ ID NO: 11706 - DNA, 21 bp, Artificial Sequence
  Chr12_3 Reverse Primer
tgcaagagtggaatgttctga

SEQ ID NO: 11707 - DNA, 20 bp, Artificial Sequence
  Chr12_3 Reverse Primer
ggctaagatgatgcccaaaa

SEQ ID NO: 11708 - DNA, 20 bp, Artificial Sequence
  Chr12_3 Reverse Primer
tttccacatcttaccatccg

SEQ ID NO: 11709 - DNA, 20 bp, Artificial Sequence
  Chr12_3 Reverse Primer
tgaagggtgctgtgtttctg

SEQ ID NO: 11710 - DNA, 20 bp, Artificial Sequence
  Chr12_3 Reverse Primer
tttatttgatgggactgggc

SEQ ID NO: 11711 - DNA, 20 bp, Artificial Sequence
  Chr12_3 Reverse Primer
tacagcagggaagccgtact

SEQ ID NO: 11712 - DNA, 20 bp, Artificial Sequence
  Chr12_3 Reverse Primer
tttttccctccactttgagc

SEQ ID NO: 11713 - DNA, 20 bp, Artificial Sequence
  Chr12_3 Reverse Primer
acatgcagatcaaacatccg

SEQ ID NO: 11714 - DNA, 20 bp, Artificial Sequence
  Chr12_3 Reverse Primer
ggggaagccaagaagaaaaa

SEQ ID NO: 11715 - DNA, 20 bp, Artificial Sequence
  Chr12_3 Reverse Primer
aggagggggatgatgatagg

SEQ ID NO: 11716 - DNA, 20 bp, Artificial Sequence
  Chr12_3 Reverse Primer
aaagattgcagccttagcca

SEQ ID NO: 11717 - DNA, 20 bp, Artificial Sequence
  Chr12_3 Reverse Primer
cagagaagaggacctgtggg

SEQ ID NO: 11718 - DNA, 19 bp, Artificial Sequence
  Chr12_3 Reverse Primer
aggcagagccaaagcctta

SEQ ID NO: 11719 - DNA, 20 bp, Artificial Sequence
  Chr12_3 Reverse Primer
ttggcttggagcctagttgt

SEQ ID NO: 11720 - DNA, 21 bp, Artificial Sequence
  Chr12_3 Reverse Primer
caaatgaagaggaagtgtggg

SEQ ID NO: 11721 - DNA, 20 bp, Artificial Sequence
  Chr12_3 Reverse Primer
tgaagctgaggtgcttttga

SEQ ID NO: 11722 - DNA, 20 bp, Artificial Sequence
  Chr12_3 Reverse Primer
gggacacccacagatcaagt

SEQ ID NO: 11723 - DNA, 26 bp, Artificial Sequence
  Chr12_3 Reverse Primer
tgtagaaacatctttgctaggtatcg

SEQ ID NO: 11724 - DNA, 20 bp, Artificial Sequence
  Chr12_3 Reverse Primer
tcattagcctccaagccatc

SEQ ID NO: 11725 - DNA, 20 bp, Artificial Sequence
  Chr12_3 Reverse Primer
tcgcttaatcctcacactgc

SEQ ID NO: 11726 - DNA, 20 bp, Artificial Sequence
  Chr12_3 Reverse Primer
ttggaaaccaggacccatag

SEQ ID NO: 11727 - DNA, 20 bp, Artificial Sequence
  Chr12_3 Reverse Primer
acaaggatggttctggctcc

SEQ ID NO: 11728 - DNA, 21 bp, Artificial Sequence
  Chr12_3 Reverse Primer
ttcaggttggaatctggatct

SEQ ID NO: 11729 - DNA, 22 bp, Artificial Sequence
  Chr12_4 Forward Primer
taggggatgtaaaatgcctaca

SEQ ID NO: 11730 - DNA, 20 bp, Artificial Sequence
  Chr12_4 Forward Primer
taggtcctgtgctttgcctt

SEQ ID NO: 11731 - DNA, 20 bp, Artificial Sequence
  Chr12_4 Forward Primer
tgtgtgctggatgaaggtgt

SEQ ID NO: 11732 - DNA, 20 bp, Artificial Sequence
  Chr12_4 Forward Primer
cagatgcccaggtcacacta

SEQ ID NO: 11733 - DNA, 20 bp, Artificial Sequence
  Chr12_4 Forward Primer
tataggggagggggcttcta

SEQ ID NO: 11734 - DNA, 20 bp, Artificial Sequence
  Chr12_4 Forward Primer
ccttttggagccctaacaca

SEQ ID NO: 11735 - DNA, 20 bp, Artificial Sequence
  Chr12_4 Forward Primer
ttgccttttattctctgccc

SEQ ID NO: 11736 - DNA, 20 bp, Artificial Sequence
  Chr12_4 Forward Primer
tattaccccttggagggacg

SEQ ID NO: 11737 - DNA, 20 bp, Artificial Sequence
  Chr12_4 Forward Primer
tctcacccaatgtttcctcc

SEQ ID NO: 11738 - DNA, 20 bp, Artificial Sequence
  Chr12_4 Forward Primer
gaggttatgtggggaagcaa

SEQ ID NO: 11739 - DNA, 26 bp, Artificial Sequence
  Chr12_4 Forward Primer
tgttaaaccctgtaatattcaaaaca

SEQ ID NO: 11740 - DNA, 20 bp, Artificial Sequence
  Chr12_4 Forward Primer
aacatgtttgcttgcttgga

SEQ ID NO: 11741 - DNA, 20 bp, Artificial Sequence
  Chr12_4 Forward Primer
ggcactagctcttgccaatc

SEQ ID NO: 11742 - DNA, 20 bp, Artificial Sequence
  Chr12_4 Forward Primer
gacccttagtcctccctcca

SEQ ID NO: 11743 - DNA, 23 bp, Artificial Sequence
  Chr12_4 Forward Primer
ggaaaaatgaaaaggtatgagca

SEQ ID NO: 11744 - DNA, 20 bp, Artificial Sequence
  Chr12_4 Forward Primer
tgaatgctttttcccaccat

SEQ ID NO: 11745 - DNA, 20 bp, Artificial Sequence
  Chr12_4 Forward Primer
cgcacctggtgtcagtagac

SEQ ID NO: 11746 - DNA, 20 bp, Artificial Sequence
  Chr12_4 Forward Primer
cctggcttcttcagccatta

SEQ ID NO: 11747 - DNA, 20 bp, Artificial Sequence
  Chr12_4 Forward Primer
ttgttctgaggattgctgga

SEQ ID NO: 11748 - DNA, 20 bp, Artificial Sequence
  Chr12_4 Forward Primer
tccattgcttggtagatccc

SEQ ID NO: 11749 - DNA, 20 bp, Artificial Sequence
  Chr12_4 Forward Primer
caaaccatccaagaactgcc

SEQ ID NO: 11750 - DNA, 20 bp, Artificial Sequence
  Chr12_4 Forward Primer
gccagcattgagtttggagt

SEQ ID NO: 11751 - DNA, 22 bp, Artificial Sequence
  Chr12_4 Forward Primer
gcatctttggagtcttcactca

SEQ ID NO: 11752 - DNA, 20 bp, Artificial Sequence
  Chr12_4 Forward Primer
gagagtggggactggtcttg

SEQ ID NO: 11753 - DNA, 20 bp, Artificial Sequence
  Chr12_4 Forward Primer
ggcaatgcctcaccagtaaa

SEQ ID NO: 11754 - DNA, 20 bp, Artificial Sequence
  Chr12_4 Forward Primer
tgagagagatgtgcctccaa

SEQ ID NO: 11755 - DNA, 20 bp, Artificial Sequence
  Chr12_4 Forward Primer
aactgcgaaagggttactga

SEQ ID NO: 11756 - DNA, 20 bp, Artificial Sequence
  Chr12_4 Forward Primer
tgcatcattgaacccacttt

SEQ ID NO: 11757 - DNA, 22 bp, Artificial Sequence
  Chr12_4 Forward Primer
tctcaccactcaggatttcaga

SEQ ID NO: 11758 - DNA, 20 bp, Artificial Sequence
  Chr12_4 Forward Primer
tgcaattgccatttcaaaaa

SEQ ID NO: 11759 - DNA, 20 bp, Artificial Sequence
  Chr12_4 Forward Primer
tgtaaaaatgcggtgcagtg

SEQ ID NO: 11760 - DNA, 20 bp, Artificial Sequence
  Chr12_4 Forward Primer
cctgggaatatgtccgttct

SEQ ID NO: 11761 - DNA, 23 bp, Artificial Sequence
  Chr12_4 Forward Primer
tggtgtcaaaatttggaaagact

SEQ ID NO: 11762 - DNA, 27 bp, Artificial Sequence
  Chr12_4 Forward Primer
tgaaattgtagaatattttgaaagcaa

SEQ ID NO: 11763 - DNA, 21 bp, Artificial Sequence
  Chr12_4 Forward Primer
cctttccacttagcctcttcg

SEQ ID NO: 11764 - DNA, 24 bp, Artificial Sequence
  Chr12_4 Forward Primer
ttgtcaagaaaaccactaccttca

SEQ ID NO: 11765 - DNA, 20 bp, Artificial Sequence
  Chr12_4 Forward Primer
ccttgctgaagggaaagttg

SEQ ID NO: 11766 - DNA, 23 bp, Artificial Sequence
  Chr12_4 Forward Primer
cagtctgaagtgttttcaggttc

SEQ ID NO: 11767 - DNA, 20 bp, Artificial Sequence
  Chr12_4 Forward Primer
cctgacatcactgcaccatc

SEQ ID NO: 11768 - DNA, 21 bp, Artificial Sequence
  Chr12_4 Forward Primer
tttaggactgggccaaaaatc

SEQ ID NO: 11769 - DNA, 20 bp, Artificial Sequence
  Chr12_4 Forward Primer
ctgggttatcacagcagcct

SEQ ID NO: 11770 - DNA, 20 bp, Artificial Sequence
  Chr12_4 Forward Primer
ctctgcttggaatgtgcatc

SEQ ID NO: 11771 - DNA, 20 bp, Artificial Sequence
  Chr12_4 Forward Primer
ccccaacaacaacaaaaagg

SEQ ID NO: 11772 - DNA, 20 bp, Artificial Sequence
  Chr12_4 Forward Primer
tctgagccttttggtttgct

SEQ ID NO: 11773 - DNA, 20 bp, Artificial Sequence
  Chr12_4 Forward Primer
taattttggatggggcttcc

SEQ ID NO: 11774 - DNA, 20 bp, Artificial Sequence
  Chr12_4 Forward Primer
tattgttgggttagggctgc

SEQ ID NO: 11775 - DNA, 20 bp, Artificial Sequence
  Chr12_4 Forward Primer
gggaaaggaagagggacttc

SEQ ID NO: 11776 - DNA, 20 bp, Artificial Sequence
  Chr12_4 Forward Primer
cccccagacttcttggtgta

SEQ ID NO: 11777 - DNA, 21 bp, Artificial Sequence
  Chr12_4 Forward Primer
ctgcttttgggtatggtcact

SEQ ID NO: 11778 - DNA, 20 bp, Artificial Sequence
  Chr12_4 Forward Primer
tcctcagggcttccactaga

SEQ ID NO: 11779 - DNA, 21 bp, Artificial Sequence
  Chr12_4 Forward Primer
cgggaaccaatctcattaaca

SEQ ID NO: 11780 - DNA, 20 bp, Artificial Sequence
  Chr12_4 Forward Primer
ggtcccctcaaaccttcagt

SEQ ID NO: 11781 - DNA, 20 bp, Artificial Sequence
  Chr12_4 Forward Primer
tggcagtgtttttgatctgg

SEQ ID NO: 11782 - DNA, 20 bp, Artificial Sequence
  Chr12_4 Forward Primer
tggaatttcaccccatcatt

SEQ ID NO: 11783 - DNA, 22 bp, Artificial Sequence
  Chr12_4 Forward Primer
gcctagcatatatgtgaagcct

SEQ ID NO: 11784 - DNA, 23 bp, Artificial Sequence
  Chr12_4 Forward Primer
aacatgtttctgagattttccag

SEQ ID NO: 11785 - DNA, 20 bp, Artificial Sequence
  Chr12_4 Forward Primer
gatagacatttgcccaccgt

SEQ ID NO: 11786 - DNA, 22 bp, Artificial Sequence
  Chr12_4 Forward Primer
agttacctcccttgtggtcaaa

SEQ ID NO: 11787 - DNA, 21 bp, Artificial Sequence
  Chr12_4 Forward Primer
ccattccgggatttttatgtt

SEQ ID NO: 11788 - DNA, 20 bp, Artificial Sequence
  Chr12_4 Forward Primer
ctcgagccatggttcttttt

SEQ ID NO: 11789 - DNA, 20 bp, Artificial Sequence
  Chr12_4 Forward Primer
tttgaagatgtcagtgggca

SEQ ID NO: 11790 - DNA, 20 bp, Artificial Sequence
  Chr12_4 Forward Primer
tccaggtcggtgtgttgtaa

SEQ ID NO: 11791 - DNA, 20 bp, Artificial Sequence
  Chr12_4 Forward Primer
cccaagcagaagtggaaaaa

SEQ ID NO: 11792 - DNA, 20 bp, Artificial Sequence
  Chr12_4 Forward Primer
agggagaggaagaagccaag

SEQ ID NO: 11793 - DNA, 20 bp, Artificial Sequence
  Chr12_4 Forward Primer
gcataattaggggtttgcca

SEQ ID NO: 11794 - DNA, 21 bp, Artificial Sequence
  Chr12_4 Forward Primer
tccaagttgtactgcaaaggc

SEQ ID NO: 11795 - DNA, 22 bp, Artificial Sequence
  Chr12_4 Forward Primer
catttgctatgctctctgacca

SEQ ID NO: 11796 - DNA, 20 bp, Artificial Sequence
  Chr12_4 Forward Primer
cacacctactcctgtggggt

SEQ ID NO: 11797 - DNA, 20 bp, Artificial Sequence
  Chr12_4 Forward Primer
tgtgcactgtccaaacgaat

SEQ ID NO: 11798 - DNA, 20 bp, Artificial Sequence
  Chr12_4 Forward Primer
cccttgcatggaaatgagtc

SEQ ID NO: 11799 - DNA, 21 bp, Artificial Sequence
  Chr12_4 Forward Primer
tgtcccacatttacctcttcg

SEQ ID NO: 11800 - DNA, 20 bp, Artificial Sequence
  Chr12_4 Forward Primer
gcaatgatgcttggttgaaa

SEQ ID NO: 11801 - DNA, 20 bp, Artificial Sequence
  Chr12_4 Forward Primer
cctggggacttgaatgaatc

SEQ ID NO: 11802 - DNA, 22 bp, Artificial Sequence
  Chr12_4 Forward Primer
ggaacaaatggcttaaacagaa

SEQ ID NO: 11803 - DNA, 20 bp, Artificial Sequence
  Chr12_4 Forward Primer
ggagagcatttttggtggtt

SEQ ID NO: 11804 - DNA, 21 bp, Artificial Sequence
  Chr12_4 Forward Primer
agcacactcttgaaggcaact

SEQ ID NO: 11805 - DNA, 20 bp, Artificial Sequence
  Chr12_4 Forward Primer
tattccacacacatttggca

SEQ ID NO: 11806 - DNA, 20 bp, Artificial Sequence
  Chr12_4 Forward Primer
agaattattggtggcatggg

SEQ ID NO: 11807 - DNA, 24 bp, Artificial Sequence
  Chr12_4 Forward Primer
tgttaacaggtgtaccatgaaaaa

SEQ ID NO: 11808 - DNA, 20 bp, Artificial Sequence
  Chr12_4 Forward Primer
gtggcagacactatgcaagg

SEQ ID NO: 11809 - DNA, 20 bp, Artificial Sequence
  Chr12_4 Forward Primer
ggaggaagtgctagccacag

SEQ ID NO: 11810 - DNA, 20 bp, Artificial Sequence
  Chr12_4 Forward Primer
cccagaatgcaggatttttc

SEQ ID NO: 11811 - DNA, 20 bp, Artificial Sequence
  Chr12_4 Forward Primer
cctggcttcattgtgtgttg

SEQ ID NO: 11812 - DNA, 20 bp, Artificial Sequence
  Chr12_4 Forward Primer
gtggttggcaatagctccat

SEQ ID NO: 11813 - DNA, 20 bp, Artificial Sequence
  Chr12_4 Forward Primer
ctgcctagtttcttggtccg

SEQ ID NO: 11814 - DNA, 22 bp, Artificial Sequence
  Chr12_4 Forward Primer
ttgcacaaataccactgactcc

SEQ ID NO: 11815 - DNA, 20 bp, Artificial Sequence
  Chr12_4 Forward Primer
ggggacttcagtgacaggaa

SEQ ID NO: 11816 - DNA, 20 bp, Artificial Sequence
  Chr12_4 Forward Primer
acagtgcccagccatcaaat

SEQ ID NO: 11817 - DNA, 20 bp, Artificial Sequence
  Chr12_4 Forward Primer
gaccagaagaaatggcctga

SEQ ID NO: 11818 - DNA, 23 bp, Artificial Sequence
  Chr12_4 Forward Primer
tgcatttgaatagttttcagcaa

SEQ ID NO: 11819 - DNA, 20 bp, Artificial Sequence
  Chr12_4 Forward Primer
tcaaatcacctggaaagcaa

SEQ ID NO: 11820 - DNA, 25 bp, Artificial Sequence
  Chr12_4 Forward Primer
tcatgttttaaaccaagtaacctga

SEQ ID NO: 11821 - DNA, 23 bp, Artificial Sequence
  Chr12_4 Forward Primer
ggggtagaggtatatcacccaaa

SEQ ID NO: 11822 - DNA, 20 bp, Artificial Sequence
  Chr12_4 Forward Primer
attgggctccaactcatgtc

SEQ ID NO: 11823 - DNA, 20 bp, Artificial Sequence
  Chr12_4 Forward Primer
gcacacaatttctctggcaa

SEQ ID NO: 11824 - DNA, 20 bp, Artificial Sequence
  Chr12_4 Forward Primer
agagggcttgttggagcatt

SEQ ID NO: 11825 - DNA, 20 bp, Artificial Sequence
  Chr12_4 Reverse Primer
ttctttgagggaagtgaccg

SEQ ID NO: 11826 - DNA, 20 bp, Artificial Sequence
  Chr12_4 Reverse Primer
ttctcccattcatgcctttc

SEQ ID NO: 11827 - DNA, 20 bp, Artificial Sequence
  Chr12_4 Reverse Primer
gtcttcaggtgtcaccccat

SEQ ID NO: 11828 - DNA, 20 bp, Artificial Sequence
  Chr12_4 Reverse Primer
accattatcccaatttgcca

SEQ ID NO: 11829 - DNA, 20 bp, Artificial Sequence
  Chr12_4 Reverse Primer
aagcactcagcaccttcacc

SEQ ID NO: 11830 - DNA, 20 bp, Artificial Sequence
  Chr12_4 Reverse Primer
caaacagtggggtcaattcc

SEQ ID NO: 11831 - DNA, 20 bp, Artificial Sequence
  Chr12_4 Reverse Primer
tgagcccattgttaagcaga

SEQ ID NO: 11832 - DNA, 20 bp, Artificial Sequence
  Chr12_4 Reverse Primer
ctggggactgaggctagaag

SEQ ID NO: 11833 - DNA, 21 bp, Artificial Sequence
  Chr12_4 Reverse Primer
ccatttcaaatcctgcttctg

SEQ ID NO: 11834 - DNA, 20 bp, Artificial Sequence
  Chr12_4 Reverse Primer
gcaaaaagaaaatcaagccc

SEQ ID NO: 11835 - DNA, 24 bp, Artificial Sequence
  Chr12_4 Reverse Primer
ttgtgttgacaaggaatactgtct

SEQ ID NO: 11836 - DNA, 20 bp, Artificial Sequence
  Chr12_4 Reverse Primer
caacatgccgatcagaacac

SEQ ID NO: 11837 - DNA, 20 bp, Artificial Sequence
  Chr12_4 Reverse Primer
ccaggctgggaatcttgtaa

SEQ ID NO: 11838 - DNA, 20 bp, Artificial Sequence
  Chr12_4 Reverse Primer
ttcattcacaagatggctgg

SEQ ID NO: 11839 - DNA, 22 bp, Artificial Sequence
  Chr12_4 Reverse Primer
attgtgtgcataaaggaccaaa

SEQ ID NO: 11840 - DNA, 26 bp, Artificial Sequence
  Chr12_4 Reverse Primer
cgcattagtgatttttatctaaccaa

SEQ ID NO: 11841 - DNA, 20 bp, Artificial Sequence
  Chr12_4 Reverse Primer
ggctgcaaatttcatgtcaa

SEQ ID NO: 11842 - DNA, 24 bp, Artificial Sequence
  Chr12_4 Reverse Primer
tcatctacctctccagtctcattg

SEQ ID NO: 11843 - DNA, 20 bp, Artificial Sequence
  Chr12_4 Reverse Primer
tacaggcatgagccactttg

SEQ ID NO: 11844 - DNA, 20 bp, Artificial Sequence
  Chr12_4 Reverse Primer
gcccctctccctacaagaag

SEQ ID NO: 11845 - DNA, 20 bp, Artificial Sequence
  Chr12_4 Reverse Primer
ggatccagtaacctctcccc

SEQ ID NO: 11846 - DNA, 26 bp, Artificial Sequence
  Chr12_4 Reverse Primer
aaaaagaccttgagaatttatctgga

SEQ ID NO: 11847 - DNA, 23 bp, Artificial Sequence
  Chr12_4 Reverse Primer
cctatcccaaaattaagttgctg

SEQ ID NO: 11848 - DNA, 22 bp, Artificial Sequence
  Chr12_4 Reverse Primer
tggcatgaaaatcttgaatgtt

SEQ ID NO: 11849 - DNA, 20 bp, Artificial Sequence
  Chr12_4 Reverse Primer
ccctcagcattacacactgc

SEQ ID NO: 11850 - DNA, 20 bp, Artificial Sequence
  Chr12_4 Reverse Primer
gaatcccacaacaacttggg

SEQ ID NO: 11851 - DNA, 20 bp, Artificial Sequence
  Chr12_4 Reverse Primer
ttggaattgaaacacatgcc

SEQ ID NO: 11852 - DNA, 22 bp, Artificial Sequence
  Chr12_4 Reverse Primer
aaatgcccagttaattttgaca

SEQ ID NO: 11853 - DNA, 27 bp, Artificial Sequence
  Chr12_4 Reverse Primer
gaaggatccattcattctataaaagtc

SEQ ID NO: 11854 - DNA, 20 bp, Artificial Sequence
  Chr12_4 Reverse Primer
atttgagcccccgagttaag

SEQ ID NO: 11855 - DNA, 20 bp, Artificial Sequence
  Chr12_4 Reverse Primer
ccaaagagatgggcttcaga

SEQ ID NO: 11856 - DNA, 22 bp, Artificial Sequence
  Chr12_4 Reverse Primer
ggttttgctcattttgtttgtg

SEQ ID NO: 11857 - DNA, 20 bp, Artificial Sequence
  Chr12_4 Reverse Primer
tggacttgcaaagaaaggtg

SEQ ID NO: 11858 - DNA, 23 bp, Artificial Sequence
  Chr12_4 Reverse Primer
aaatctcctggacatagcagttc

SEQ ID NO: 11859 - DNA, 22 bp, Artificial Sequence
  Chr12_4 Reverse Primer
tttgggtaacatatttcctggg

SEQ ID NO: 11860 - DNA, 21 bp, Artificial Sequence
  Chr12_4 Reverse Primer
ttccagagacaagagggtgtt

SEQ ID NO: 11861 - DNA, 20 bp, Artificial Sequence
  Chr12_4 Reverse Primer
atgggagagcctgtctttga

SEQ ID NO: 11862 - DNA, 20 bp, Artificial Sequence
  Chr12_4 Reverse Primer
atcctcggggaccactttta

SEQ ID NO: 11863 - DNA, 20 bp, Artificial Sequence
  Chr12_4 Reverse Primer
tcctcacgcatggtgttcta

SEQ ID NO: 11864 - DNA, 23 bp, Artificial Sequence
  Chr12_4 Reverse Primer
aatgaatgtttcttgaatgtgcc

SEQ ID NO: 11865 - DNA, 20 bp, Artificial Sequence
  Chr12_4 Reverse Primer
aggtcagatcatggaggacc

SEQ ID NO: 11866 - DNA, 20 bp, Artificial Sequence
  Chr12_4 Reverse Primer
tcccatttattgtgaagggc

SEQ ID NO: 11867 - DNA, 20 bp, Artificial Sequence
  Chr12_4 Reverse Primer
tgtgggattcacatgaccac

SEQ ID NO: 11868 - DNA, 20 bp, Artificial Sequence
  Chr12_4 Reverse Primer
ctctttcattggccacacct

SEQ ID NO: 11869 - DNA, 20 bp, Artificial Sequence
  Chr12_4 Reverse Primer
aaaaagccatcagtgaccca

SEQ ID NO: 11870 - DNA, 20 bp, Artificial Sequence
  Chr12_4 Reverse Primer
tactctccccatcatggtcc

SEQ ID NO: 11871 - DNA, 20 bp, Artificial Sequence
  Chr12_4 Reverse Primer
taataatttgcaccccacgc

SEQ ID NO: 11872 - DNA, 20 bp, Artificial Sequence
  Chr12_4 Reverse Primer
cttttcccatggtgctgact

SEQ ID NO: 11873 - DNA, 21 bp, Artificial Sequence
  Chr12_4 Reverse Primer
tgcaacgtagaatgcagatga

SEQ ID NO: 11874 - DNA, 20 bp, Artificial Sequence
  Chr12_4 Reverse Primer
gccaaagatgggtggagata

SEQ ID NO: 11875 - DNA, 22 bp, Artificial Sequence
  Chr12_4 Reverse Primer
tgtgctaatggtaaatacccca

SEQ ID NO: 11876 - DNA, 20 bp, Artificial Sequence
  Chr12_4 Reverse Primer
tggcaaaaatacgagcagtg

SEQ ID NO: 11877 - DNA, 20 bp, Artificial Sequence
  Chr12_4 Reverse Primer
aataagcacctccatggcct

SEQ ID NO: 11878 - DNA, 20 bp, Artificial Sequence
  Chr12_4 Reverse Primer
ttctttgtgcctccatttcc

SEQ ID NO: 11879 - DNA, 22 bp, Artificial Sequence
  Chr12_4 Reverse Primer
ctccataaatctttgaccacca

SEQ ID NO: 11880 - DNA, 20 bp, Artificial Sequence
  Chr12_4 Reverse Primer
attgccttgcaatcaagagg

SEQ ID NO: 11881 - DNA, 20 bp, Artificial Sequence
  Chr12_4 Reverse Primer
cctttcttgtccattcccaa

SEQ ID NO: 11882 - DNA, 20 bp, Artificial Sequence
  Chr12_4 Reverse Primer
aattatgcatggcatgagcc

SEQ ID NO: 11883 - DNA, 21 bp, Artificial Sequence
  Chr12_4 Reverse Primer
gcaataccagagatggttgga

SEQ ID NO: 11884 - DNA, 23 bp, Artificial Sequence
  Chr12_4 Reverse Primer
tgaactcaactcacctttgaatg

SEQ ID NO: 11885 - DNA, 20 bp, Artificial Sequence
  Chr12_4 Reverse Primer
tgtttctgagggtgtcccat

SEQ ID NO: 11886 - DNA, 20 bp, Artificial Sequence
  Chr12_4 Reverse Primer
tctacacccacaaaatccca

SEQ ID NO: 11887 - DNA, 22 bp, Artificial Sequence
  Chr12_4 Reverse Primer
ctcctctgttcaaattccttga

SEQ ID NO: 11888 - DNA, 20 bp, Artificial Sequence
  Chr12_4 Reverse Primer
ctctacgctttcaaccagcc

SEQ ID NO: 11889 - DNA, 20 bp, Artificial Sequence
  Chr12_4 Reverse Primer
cagagagcttctttggggaa

SEQ ID NO: 11890 - DNA, 20 bp, Artificial Sequence
  Chr12_4 Reverse Primer
caagaaaccctggatggaca

SEQ ID NO: 11891 - DNA, 27 bp, Artificial Sequence
  Chr12_4 Reverse Primer
catattactactacttggcgttattgg

SEQ ID NO: 11892 - DNA, 23 bp, Artificial Sequence
  Chr12_4 Reverse Primer
aagaaagcaaagacagaagcaaa

SEQ ID NO: 11893 - DNA, 20 bp, Artificial Sequence
  Chr12_4 Reverse Primer
attggcaatattcctgcctg

SEQ ID NO: 11894 - DNA, 20 bp, Artificial Sequence
  Chr12_4 Reverse Primer
gtttcaggagcctctggatg

SEQ ID NO: 11895 - DNA, 21 bp, Artificial Sequence
  Chr12_4 Reverse Primer
ccaaaactccctgagagaacc

SEQ ID NO: 11896 - DNA, 22 bp, Artificial Sequence
  Chr12_4 Reverse Primer
ttggcatagacaaaatgctaca

SEQ ID NO: 11897 - DNA, 20 bp, Artificial Sequence
  Chr12_4 Reverse Primer
tgaacaggcagatgaatgga

SEQ ID NO: 11898 - DNA, 22 bp, Artificial Sequence
  Chr12_4 Reverse Primer
aatgtctctccagatgaacaca

SEQ ID NO: 11899 - DNA, 20 bp, Artificial Sequence
  Chr12_4 Reverse Primer
acaggatttgtgctctgcct

SEQ ID NO: 11900 - DNA, 20 bp, Artificial Sequence
  Chr12_4 Reverse Primer
cacatggagaggcatctttg

SEQ ID NO: 11901 - DNA, 20 bp, Artificial Sequence
  Chr12_4 Reverse Primer
cctgctggctgaatctgact

SEQ ID NO: 11902 - DNA, 20 bp, Artificial Sequence
  Chr12_4 Reverse Primer
gttagccaatggaccagagc

SEQ ID NO: 11903 - DNA, 20 bp, Artificial Sequence
  Chr12_4 Reverse Primer
atgtctacaggtgggccaag

SEQ ID NO: 11904 - DNA, 20 bp, Artificial Sequence
  Chr12_4 Reverse Primer
aacaaaactgggttccctcc

SEQ ID NO: 11905 - DNA, 20 bp, Artificial Sequence
  Chr12_4 Reverse Primer
ggggacctgaatttgtttga

SEQ ID NO: 11906 - DNA, 20 bp, Artificial Sequence
  Chr12_4 Reverse Primer
accatggaaactgtcattgc

SEQ ID NO: 11907 - DNA, 20 bp, Artificial Sequence
  Chr12_4 Reverse Primer
cgagaggcaattttccttga

SEQ ID NO: 11908 - DNA, 20 bp, Artificial Sequence
  Chr12_4 Reverse Primer
atcgtttggaggggagaagt

SEQ ID NO: 11909 - DNA, 20 bp, Artificial Sequence
  Chr12_4 Reverse Primer
agatagctgttggggagctg

SEQ ID NO: 11910 - DNA, 20 bp, Artificial Sequence
  Chr12_4 Reverse Primer
ccccaaaccgaagattaaca

SEQ ID NO: 11911 - DNA, 21 bp, Artificial Sequence
  Chr12_4 Reverse Primer
ttcacccaatttgctaaaacg

SEQ ID NO: 11912 - DNA, 27 bp, Artificial Sequence
  Chr12_4 Reverse Primer
aatctgaagaagctaatctttgtatga

SEQ ID NO: 11913 - DNA, 20 bp, Artificial Sequence
  Chr12_4 Reverse Primer
cataaatgctcgcaaaagca

SEQ ID NO: 11914 - DNA, 20 bp, Artificial Sequence
  Chr12_4 Reverse Primer
acagaatgtgggcaagatca

SEQ ID NO: 11915 - DNA, 22 bp, Artificial Sequence
  Chr12_4 Reverse Primer
gcccaaacttatttttactgcc

SEQ ID NO: 11916 - DNA, 23 bp, Artificial Sequence
  Chr12_4 Reverse Primer
gctctagtgagatacgaaagcca

SEQ ID NO: 11917 - DNA, 21 bp, Artificial Sequence
  Chr12_4 Reverse Primer
ggcataggtttgagacttggc

SEQ ID NO: 11918 - DNA, 20 bp, Artificial Sequence
  Chr12_4 Reverse Primer
tgctggaggaggcttagaaa

SEQ ID NO: 11919 - DNA, 22 bp, Artificial Sequence
  Chr12_4 Reverse Primer
tgaatggatacctagcaatgga

SEQ ID NO: 11920 - DNA, 26 bp, Artificial Sequence
  Chr12_4 Reverse Primer
tgcatatttagttctatggcttgatt

SEQ ID NO: 11921 - DNA, 20 bp, Artificial Sequence
  Chr12_5 Forward Primer
tggagtgtgtttcaaggctg

SEQ ID NO: 11922 - DNA, 20 bp, Artificial Sequence
  Chr12_5 Forward Primer
tcttccacaaaccaagggac

SEQ ID NO: 11923 - DNA, 20 bp, Artificial Sequence
  Chr12_5 Forward Primer
ctgggccaaaatcacaaagt

SEQ ID NO: 11924 - DNA, 20 bp, Artificial Sequence
  Chr12_5 Forward Primer
cagtgatcccctgtcaggtt

SEQ ID NO: 11925 - DNA, 20 bp, Artificial Sequence
  Chr12_5 Forward Primer
gaagaccttttctgggaggg

SEQ ID NO: 11926 - DNA, 20 bp, Artificial Sequence
  Chr12_5 Forward Primer
cacagtggcaaattgctgag

SEQ ID NO: 11927 - DNA, 20 bp, Artificial Sequence
  Chr12_5 Forward Primer
tagaagggaagggcaggtct

SEQ ID NO: 11928 - DNA, 20 bp, Artificial Sequence
  Chr12_5 Forward Primer
gcttctctgacatggtctgc

SEQ ID NO: 11929 - DNA, 20 bp, Artificial Sequence
  Chr12_5 Forward Primer
gctgggccatttttaactga

SEQ ID NO: 11930 - DNA, 20 bp, Artificial Sequence
  Chr12_5 Forward Primer
acttgctgatttcttgccgt

SEQ ID NO: 11931 - DNA, 20 bp, Artificial Sequence
  Chr12_5 Forward Primer
gcaaggtttgagactgctcc

SEQ ID NO: 11932 - DNA, 20 bp, Artificial Sequence
  Chr12_5 Forward Primer
gagaaactcgatgcctctgg

SEQ ID NO: 11933 - DNA, 20 bp, Artificial Sequence
  Chr12_5 Forward Primer
gaggtcctctgtgggtcgta

SEQ ID NO: 11934 - DNA, 20 bp, Artificial Sequence
  Chr12_5 Forward Primer
gtggacacgtttcctgctct

SEQ ID NO: 11935 - DNA, 24 bp, Artificial Sequence
  Chr12_5 Forward Primer
aacacacttgactgagaggttttt

SEQ ID NO: 11936 - DNA, 20 bp, Artificial Sequence
  Chr12_5 Forward Primer
tgcagtccagctacttggtg

SEQ ID NO: 11937 - DNA, 20 bp, Artificial Sequence
  Chr12_5 Forward Primer
tctctgactttcttccccca

SEQ ID NO: 11938 - DNA, 21 bp, Artificial Sequence
  Chr12_5 Forward Primer
ttgggataggaatccctgact

SEQ ID NO: 11939 - DNA, 20 bp, Artificial Sequence
  Chr12_5 Forward Primer
ggccttgctttataccgtga

SEQ ID NO: 11940 - DNA, 20 bp, Artificial Sequence
  Chr12_5 Forward Primer
ttttggcaaatggaatgtga

SEQ ID NO: 11941 - DNA, 21 bp, Artificial Sequence
  Chr12_5 Forward Primer
gcaagtgctatacatcagggc

SEQ ID NO: 11942 - DNA, 21 bp, Artificial Sequence
  Chr12_5 Forward Primer
caggagcatgttatgcagtga

SEQ ID NO: 11943 - DNA, 22 bp, Artificial Sequence
  Chr12_5 Forward Primer
gcatccagaaataaaggacttg

SEQ ID NO: 11944 - DNA, 20 bp, Artificial Sequence
  Chr12_5 Forward Primer
cagggagtggcaaggttcta

SEQ ID NO: 11945 - DNA, 20 bp, Artificial Sequence
  Chr12_5 Forward Primer
tggccatccatttatccaat

SEQ ID NO: 11946 - DNA, 20 bp, Artificial Sequence
  Chr12_5 Forward Primer
caacccggctttactgactc

SEQ ID NO: 11947 - DNA, 20 bp, Artificial Sequence
  Chr12_5 Forward Primer
aatggccaaaaaggtaaaca

SEQ ID NO: 11948 - DNA, 20 bp, Artificial Sequence
  Chr12_5 Forward Primer
atgggttgggatgatgaaaa

SEQ ID NO: 11949 - DNA, 20 bp, Artificial Sequence
  Chr12_5 Forward Primer
gctactgctggccaggtatg

SEQ ID NO: 11950 - DNA, 20 bp, Artificial Sequence
  Chr12_5 Forward Primer
agcaggggtctgtcttagca

SEQ ID NO: 11951 - DNA, 20 bp, Artificial Sequence
  Chr12_5 Forward Primer
ttgaaaaatcccagaaccct

SEQ ID NO: 11952 - DNA, 20 bp, Artificial Sequence
  Chr12_5 Forward Primer
gtgccctagttcattgcgtt

SEQ ID NO: 11953 - DNA, 21 bp, Artificial Sequence
  Chr12_5 Forward Primer
tcggtgtccagaatagtgtca

SEQ ID NO: 11954 - DNA, 20 bp, Artificial Sequence
  Chr12_5 Forward Primer
cgtgaatgctgaattgatgg

SEQ ID NO: 11955 - DNA, 21 bp, Artificial Sequence
  Chr12_5 Forward Primer
gaggcccaaagaggataagaa

SEQ ID NO: 11956 - DNA, 20 bp, Artificial Sequence
  Chr12_5 Forward Primer
gtttgagctggttggagacc

SEQ ID NO: 11957 - DNA, 20 bp, Artificial Sequence
  Chr12_5 Forward Primer
ttgtggcagaaggaggactt

SEQ ID NO: 11958 - DNA, 20 bp, Artificial Sequence
  Chr12_5 Forward Primer
atgctggggttaaactggtg

SEQ ID NO: 11959 - DNA, 20 bp, Artificial Sequence
  Chr12_5 Forward Primer
ccccagacctaggatgatga

SEQ ID NO: 11960 - DNA, 20 bp, Artificial Sequence
  Chr12_5 Forward Primer
acaaatgcaatcaagggacc

SEQ ID NO: 11961 - DNA, 20 bp, Artificial Sequence
  Chr12_5 Forward Primer
tgactttcagcagcctatcg

SEQ ID NO: 11962 - DNA, 24 bp, Artificial Sequence
  Chr12_5 Forward Primer
tgtaagtcagatctccatgatgtt

SEQ ID NO: 11963 - DNA, 20 bp, Artificial Sequence
  Chr12_5 Forward Primer
gggaaatttgtggaagcaga

SEQ ID NO: 11964 - DNA, 20 bp, Artificial Sequence
  Chr12_5 Forward Primer
attgggtgaatggtgggata

SEQ ID NO: 11965 - DNA, 20 bp, Artificial Sequence
  Chr12_5 Forward Primer
gtccaatcccagcagtgtct

SEQ ID NO: 11966 - DNA, 20 bp, Artificial Sequence
  Chr12_5 Forward Primer
tgtgccagtaccctttttca

SEQ ID NO: 11967 - DNA, 20 bp, Artificial Sequence
  Chr12_5 Forward Primer
ttcccaagcatttggaacat

SEQ ID NO: 11968 - DNA, 20 bp, Artificial Sequence
  Chr12_5 Forward Primer
cctgcttgaataatccctgg

SEQ ID NO: 11969 - DNA, 23 bp, Artificial Sequence
  Chr12_5 Forward Primer
gaaaatgacttcttgtgctttgg

SEQ ID NO: 11970 - DNA, 26 bp, Artificial Sequence
  Chr12_5 Forward Primer
tgtttatttgcttatttgtttgcttt

SEQ ID NO: 11971 - DNA, 20 bp, Artificial Sequence
  Chr12_5 Forward Primer
aatttggacatctcttgcgg

SEQ ID NO: 11972 - DNA, 20 bp, Artificial Sequence
  Chr12_5 Forward Primer
aaaatgcccagtgtcggata

SEQ ID NO: 11973 - DNA, 20 bp, Artificial Sequence
  Chr12_5 Forward Primer
agtgaggcaatccaccagag

SEQ ID NO: 11974 - DNA, 20 bp, Artificial Sequence
  Chr12_5 Forward Primer
tcaggggactgcaagacttc

SEQ ID NO: 11975 - DNA, 20 bp, Artificial Sequence
  Chr12_5 Forward Primer
ctctctctacctgatgccgc

SEQ ID NO: 11976 - DNA, 20 bp, Artificial Sequence
  Chr12_5 Forward Primer
atgtgtgatgcaaggcatgt

SEQ ID NO: 11977 - DNA, 21 bp, Artificial Sequence
  Chr12_5 Forward Primer
ggattttgggaaattcaatgg

SEQ ID NO: 11978 - DNA, 25 bp, Artificial Sequence
  Chr12_5 Forward Primer
tgcatcaaaatctgtatctcatagg

SEQ ID NO: 11979 - DNA, 20 bp, Artificial Sequence
  Chr12_5 Forward Primer
tgctcctagctccagactgc

SEQ ID NO: 11980 - DNA, 20 bp, Artificial Sequence
  Chr12_5 Forward Primer
tcctggtcctgagaaattca

SEQ ID NO: 11981 - DNA, 20 bp, Artificial Sequence
  Chr12_5 Forward Primer
agcaaggtgaatcgaaaacg

SEQ ID NO: 11982 - DNA, 20 bp, Artificial Sequence
  Chr12_5 Forward Primer
tctagtggaggagagggggt

SEQ ID NO: 11983 - DNA, 20 bp, Artificial Sequence
  Chr12_5 Forward Primer
catcatgttggttctgtgcc

SEQ ID NO: 11984 - DNA, 20 bp, Artificial Sequence
  Chr12_5 Forward Primer
caatcctttgggacatgctt

SEQ ID NO: 11985 - DNA, 20 bp, Artificial Sequence
  Chr12_5 Forward Primer
cttgggggagatgttctcat

SEQ ID NO: 11986 - DNA, 23 bp, Artificial Sequence
  Chr12_5 Forward Primer
ttggcgttaaaatagatctgagc

SEQ ID NO: 11987 - DNA, 21 bp, Artificial Sequence
  Chr12_5 Forward Primer
tgttcataaggaaccagcaca

SEQ ID NO: 11988 - DNA, 20 bp, Artificial Sequence
  Chr12_5 Forward Primer
tttttgttggcttatggcct

SEQ ID NO: 11989 - DNA, 20 bp, Artificial Sequence
  Chr12_5 Forward Primer
cagcagcactgcctgtactc

SEQ ID NO: 11990 - DNA, 25 bp, Artificial Sequence
  Chr12_5 Forward Primer
tcttgtctcgatgtaatatctttcc

SEQ ID NO: 11991 - DNA, 20 bp, Artificial Sequence
  Chr12_5 Forward Primer
taaggcaagtgggtgtgtca

SEQ ID NO: 11992 - DNA, 23 bp, Artificial Sequence
  Chr12_5 Forward Primer
gctcctacaattgcatatggtct

SEQ ID NO: 11993 - DNA, 24 bp, Artificial Sequence
  Chr12_5 Forward Primer
gcaagagattataatggtgcaatg

SEQ ID NO: 11994 - DNA, 20 bp, Artificial Sequence
  Chr12_5 Forward Primer
tgggatttgacaactggttc

SEQ ID NO: 11995 - DNA, 20 bp, Artificial Sequence
  Chr12_5 Forward Primer
tgctgacttgaaaatgtggg

SEQ ID NO: 11996 - DNA, 20 bp, Artificial Sequence
  Chr12_5 Forward Primer
gaagaacaacaggcctggaa

SEQ ID NO: 11997 - DNA, 20 bp, Artificial Sequence
  Chr12_5 Forward Primer
ccccaaggatatgagggaat

SEQ ID NO: 11998 - DNA, 20 bp, Artificial Sequence
  Chr12_5 Forward Primer
tcttgtcatacctgcccctt

SEQ ID NO: 11999 - DNA, 20 bp, Artificial Sequence
  Chr12_5 Forward Primer
aggctggttcatctcccttt

SEQ ID NO: 12000 - DNA, 26 bp, Artificial Sequence
  Chr12_5 Forward Primer
tggtgaagacaaacagaataatacaa

SEQ ID NO: 12001 - DNA, 20 bp, Artificial Sequence
  Chr12_5 Forward Primer
tcctaccatttctgtgccaa

SEQ ID NO: 12002 - DNA, 20 bp, Artificial Sequence
  Chr12_5 Forward Primer
gtcaaaagagggaggggttt

SEQ ID NO: 12003 - DNA, 20 bp, Artificial Sequence
  Chr12_5 Forward Primer
tccgatgagctatggaggat

SEQ ID NO: 12004 - DNA, 20 bp, Artificial Sequence
  Chr12_5 Forward Primer
aagcgttgtgcaggagaaat

SEQ ID NO: 12005 - DNA, 21 bp, Artificial Sequence
  Chr12_5 Forward Primer
gacggtctcttcatctgacca

SEQ ID NO: 12006 - DNA, 20 bp, Artificial Sequence
  Chr12_5 Forward Primer
tttacccctccagtttggtg

SEQ ID NO: 12007 - DNA, 21 bp, Artificial Sequence
  Chr12_5 Forward Primer
tcacataacagcaaagggagg

SEQ ID NO: 12008 - DNA, 20 bp, Artificial Sequence
  Chr12_5 Forward Primer
tttccccttccccttagaaa

SEQ ID NO: 12009 - DNA, 20 bp, Artificial Sequence
  Chr12_5 Forward Primer
ggcagagcaaactcataggg

SEQ ID NO: 12010 - DNA, 20 bp, Artificial Sequence
  Chr12_5 Forward Primer
tcaaggcgttcacaacagag

SEQ ID NO: 12011 - DNA, 20 bp, Artificial Sequence
  Chr12_5 Forward Primer
acaaaggggctcctgttctc

SEQ ID NO: 12012 - DNA, 20 bp, Artificial Sequence
  Chr12_5 Forward Primer
ccaatttttgtggggagaga

SEQ ID NO: 12013 - DNA, 20 bp, Artificial Sequence
  Chr12_5 Forward Primer
ggctttcactggagaatgga

SEQ ID NO: 12014 - DNA, 20 bp, Artificial Sequence
  Chr12_5 Forward Primer
gaggcctttcaggggttaag

SEQ ID NO: 12015 - DNA, 24 bp, Artificial Sequence
  Chr12_5 Forward Primer
tggagatcttaacagcaagattga

SEQ ID NO: 12016 - DNA, 21 bp, Artificial Sequence
  Chr12_5 Forward Primer
aaaaagatggtggaatggaca

SEQ ID NO: 12017 - DNA, 20 bp, Artificial Sequence
  Chr12_5 Reverse Primer
tacagagagattgcccccag

SEQ ID NO: 12018 - DNA, 20 bp, Artificial Sequence
  Chr12_5 Reverse Primer
ccaggtgaccacttgacctt

SEQ ID NO: 12019 - DNA, 20 bp, Artificial Sequence
  Chr12_5 Reverse Primer
accagtgacctgacctgtcc

SEQ ID NO: 12020 - DNA, 20 bp, Artificial Sequence
  Chr12_5 Reverse Primer
ggttgcatcgtgtggttatg

SEQ ID NO: 12021 - DNA, 20 bp, Artificial Sequence
  Chr12_5 Reverse Primer
ccctgcaatcaagggtagaa

SEQ ID NO: 12022 - DNA, 21 bp, Artificial Sequence
  Chr12_5 Reverse Primer
gcgtaaagttttcctgcatca

SEQ ID NO: 12023 - DNA, 20 bp, Artificial Sequence
  Chr12_5 Reverse Primer
ggagggaggagaccctgata

SEQ ID NO: 12024 - DNA, 20 bp, Artificial Sequence
  Chr12_5 Reverse Primer
ggctcagttattcctgtggg

SEQ ID NO: 12025 - DNA, 20 bp, Artificial Sequence
  Chr12_5 Reverse Primer
cagaccacaactggagagca

SEQ ID NO: 12026 - DNA, 20 bp, Artificial Sequence
  Chr12_5 Reverse Primer
agtgacgaagggtcaaagga

SEQ ID NO: 12027 - DNA, 20 bp, Artificial Sequence
  Chr12_5 Reverse Primer
cccctcagtcagaaaccagt

SEQ ID NO: 12028 - DNA, 20 bp, Artificial Sequence
  Chr12_5 Reverse Primer
catctcctctgcctctcagc

SEQ ID NO: 12029 - DNA, 20 bp, Artificial Sequence
  Chr12_5 Reverse Primer
gtgcattcacagacactggg

SEQ ID NO: 12030 - DNA, 20 bp, Artificial Sequence
  Chr12_5 Reverse Primer
ggatgtcatgaaatggcaaa

SEQ ID NO: 12031 - DNA, 20 bp, Artificial Sequence
  Chr12_5 Reverse Primer
gggaatcatcccaagggtta

SEQ ID NO: 12032 - DNA, 20 bp, Artificial Sequence
  Chr12_5 Reverse Primer
agtgcctcccactgtaagga

SEQ ID NO: 12033 - DNA, 20 bp, Artificial Sequence
  Chr12_5 Reverse Primer
tggtgctcctccacagaaat

SEQ ID NO: 12034 - DNA, 20 bp, Artificial Sequence
  Chr12_5 Reverse Primer
ccagctctgattggcatctt

SEQ ID NO: 12035 - DNA, 20 bp, Artificial Sequence
  Chr12_5 Reverse Primer
cacaaggaacggaggaatgt

SEQ ID NO: 12036 - DNA, 20 bp, Artificial Sequence
  Chr12_5 Reverse Primer
atcaacagtgggagggtctg

SEQ ID NO: 12037 - DNA, 20 bp, Artificial Sequence
  Chr12_5 Reverse Primer
tcctcaaatcccacctcttg

SEQ ID NO: 12038 - DNA, 21 bp, Artificial Sequence
  Chr12_5 Reverse Primer
aacaagtcagtgtttgcctgg

SEQ ID NO: 12039 - DNA, 26 bp, Artificial Sequence
  Chr12_5 Reverse Primer
caaaatgaaactcaaaatctaaatgc

SEQ ID NO: 12040 - DNA, 20 bp, Artificial Sequence
  Chr12_5 Reverse Primer
tggataacaggttttgggct

SEQ ID NO: 12041 - DNA, 20 bp, Artificial Sequence
  Chr12_5 Reverse Primer
cagcactccacaagcactgt

SEQ ID NO: 12042 - DNA, 20 bp, Artificial Sequence
  Chr12_5 Reverse Primer
tggtctgtttgcatgctctc

SEQ ID NO: 12043 - DNA, 20 bp, Artificial Sequence
  Chr12_5 Reverse Primer
ttcgtcaggctccaagaact

SEQ ID NO: 12044 - DNA, 20 bp, Artificial Sequence
  Chr12_5 Reverse Primer
atgagctgtcccaggcttag

SEQ ID NO: 12045 - DNA, 26 bp, Artificial Sequence
  Chr12_5 Reverse Primer
gtaagatgttttgacgtaaaagctga

SEQ ID NO: 12046 - DNA, 22 bp, Artificial Sequence
  Chr12_5 Reverse Primer
ccacaaaataaatactgcctgc

SEQ ID NO: 12047 - DNA, 20 bp, Artificial Sequence
  Chr12_5 Reverse Primer
gtacaaagaccttggggcag

SEQ ID NO: 12048 - DNA, 20 bp, Artificial Sequence
  Chr12_5 Reverse Primer
acagtgcactctgctcttgc

SEQ ID NO: 12049 - DNA, 20 bp, Artificial Sequence
  Chr12_5 Reverse Primer
ccagaaagtcaagggaagca

SEQ ID NO: 12050 - DNA, 20 bp, Artificial Sequence
  Chr12_5 Reverse Primer
tggcacagaggaagtgaaaa

SEQ ID NO: 12051 - DNA, 20 bp, Artificial Sequence
  Chr12_5 Reverse Primer
gtggggtctcagcttctacg

SEQ ID NO: 12052 - DNA, 20 bp, Artificial Sequence
  Chr12_5 Reverse Primer
cacagccacgtggtttattg

SEQ ID NO: 12053 - DNA, 20 bp, Artificial Sequence
  Chr12_5 Reverse Primer
ttcatgtgtcccctctcaca

SEQ ID NO: 12054 - DNA, 20 bp, Artificial Sequence
  Chr12_5 Reverse Primer
ctgactgacctccccagcta

SEQ ID NO: 12055 - DNA, 20 bp, Artificial Sequence
  Chr12_5 Reverse Primer
cattaacgggaaggtcggta

SEQ ID NO: 12056 - DNA, 20 bp, Artificial Sequence
  Chr12_5 Reverse Primer
tccttacccagcatccattc

SEQ ID NO: 12057 - DNA, 20 bp, Artificial Sequence
  Chr12_5 Reverse Primer
tttatggccaaaagattggg

SEQ ID NO: 12058 - DNA, 21 bp, Artificial Sequence
  Chr12_5 Reverse Primer
cccaaggtttttcctctatcg

SEQ ID NO: 12059 - DNA, 20 bp, Artificial Sequence
  Chr12_5 Reverse Primer
attgctgtcatgctgttgct

SEQ ID NO: 12060 - DNA, 20 bp, Artificial Sequence
  Chr12_5 Reverse Primer
cctccagtctaacccctcct

SEQ ID NO: 12061 - DNA, 20 bp, Artificial Sequence
  Chr12_5 Reverse Primer
tcccaaacccacttggtaga

SEQ ID NO: 12062 - DNA, 20 bp, Artificial Sequence
  Chr12_5 Reverse Primer
attcccaagcgaacactcac

SEQ ID NO: 12063 - DNA, 23 bp, Artificial Sequence
  Chr12_5 Reverse Primer
gatgaaatgcaaacaaattctcc

SEQ ID NO: 12064 - DNA, 26 bp, Artificial Sequence
  Chr12_5 Reverse Primer
ttggtaatatgctatttgagtcttgc

SEQ ID NO: 12065 - DNA, 20 bp, Artificial Sequence
  Chr12_5 Reverse Primer
tgggcggtctttaaaatgtc

SEQ ID NO: 12066 - DNA, 23 bp, Artificial Sequence
  Chr12_5 Reverse Primer
atagccctgagatctttttaagg

SEQ ID NO: 12067 - DNA, 20 bp, Artificial Sequence
  Chr12_5 Reverse Primer
ggcctgatcacaacattcct

SEQ ID NO: 12068 - DNA, 20 bp, Artificial Sequence
  Chr12_5 Reverse Primer
acaaggtcaaccaacctgga

SEQ ID NO: 12069 - DNA, 20 bp, Artificial Sequence
  Chr12_5 Reverse Primer
tcccctcatcaccaggatta

SEQ ID NO: 12070 - DNA, 20 bp, Artificial Sequence
  Chr12_5 Reverse Primer
caaagttcccctgttctgga

SEQ ID NO: 12071 - DNA, 20 bp, Artificial Sequence
  Chr12_5 Reverse Primer
acattctcccaggtggtcag

SEQ ID NO: 12072 - DNA, 20 bp, Artificial Sequence
  Chr12_5 Reverse Primer
ttggtttatagtgggggtgg

SEQ ID NO: 12073 - DNA, 20 bp, Artificial Sequence
  Chr12_5 Reverse Primer
ccaattttacccaagccaaa

SEQ ID NO: 12074 - DNA, 20 bp, Artificial Sequence
  Chr12_5 Reverse Primer
ctagttgggccaaatggttc

SEQ ID NO: 12075 - DNA, 20 bp, Artificial Sequence
  Chr12_5 Reverse Primer
attgtaatgggcacaaaggg

SEQ ID NO: 12076 - DNA, 20 bp, Artificial Sequence
  Chr12_5 Reverse Primer
tgctggtggtggtaataagg

SEQ ID NO: 12077 - DNA, 20 bp, Artificial Sequence
  Chr12_5 Reverse Primer
ccaggaatgcaacaggagat

SEQ ID NO: 12078 - DNA, 20 bp, Artificial Sequence
  Chr12_5 Reverse Primer
acttgtgttcctgccaaacc

SEQ ID NO: 12079 - DNA, 20 bp, Artificial Sequence
  Chr12_5 Reverse Primer
caaccaaaaagggtttgcac

SEQ ID NO: 12080 - DNA, 20 bp, Artificial Sequence
  Chr12_5 Reverse Primer
tctttcgcccacctatcatc

SEQ ID NO: 12081 - DNA, 20 bp, Artificial Sequence
  Chr12_5 Reverse Primer
ccactttactggagccaagg

SEQ ID NO: 12082 - DNA, 21 bp, Artificial Sequence
  Chr12_5 Reverse Primer
cctgaatggatttcctttgct

SEQ ID NO: 12083 - DNA, 20 bp, Artificial Sequence
  Chr12_5 Reverse Primer
tgagccaataagggaggaaa

SEQ ID NO: 12084 - DNA, 20 bp, Artificial Sequence
  Chr12_5 Reverse Primer
caagggtttccaccagaaga

SEQ ID NO: 12085 - DNA, 20 bp, Artificial Sequence
  Chr12_5 Reverse Primer
tgcacgaccctgtgactaac

SEQ ID NO: 12086 - DNA, 25 bp, Artificial Sequence
  Chr12_5 Reverse Primer
tttatcatagtaagtggtttggcct

SEQ ID NO: 12087 - DNA, 20 bp, Artificial Sequence
  Chr12_5 Reverse Primer
atgaagaagtccatgcaggc

SEQ ID NO: 12088 - DNA, 20 bp, Artificial Sequence
  Chr12_5 Reverse Primer
tctctacccctggcatcttg

SEQ ID NO: 12089 - DNA, 20 bp, Artificial Sequence
  Chr12_5 Reverse Primer
caggcatctgaaatgcaaga

SEQ ID NO: 12090 - DNA, 20 bp, Artificial Sequence
  Chr12_5 Reverse Primer
agccaaaggtgtggctctat

SEQ ID NO: 12091 - DNA, 20 bp, Artificial Sequence
  Chr12_5 Reverse Primer
accctctcttcttggcacct

SEQ ID NO: 12092 - DNA, 20 bp, Artificial Sequence
  Chr12_5 Reverse Primer
aggaactcagaagggccaat

SEQ ID NO: 12093 - DNA, 20 bp, Artificial Sequence
  Chr12_5 Reverse Primer
agtggtagatgcctgaagcg

SEQ ID NO: 12094 - DNA, 20 bp, Artificial Sequence
  Chr12_5 Reverse Primer
caaatgcaatgaagaaagcg

SEQ ID NO: 12095 - DNA, 20 bp, Artificial Sequence
  Chr12_5 Reverse Primer
tgtagggaaggtctgggaaa

SEQ ID NO: 12096 - DNA, 25 bp, Artificial Sequence
  Chr12_5 Reverse Primer
aagtagttatcaagacgaccaagaa

SEQ ID NO: 12097 - DNA, 20 bp, Artificial Sequence
  Chr12_5 Reverse Primer
atgcaactgtgcaaccaaaa

SEQ ID NO: 12098 - DNA, 20 bp, Artificial Sequence
  Chr12_5 Reverse Primer
caggagctgagggtggaata

SEQ ID NO: 12099 - DNA, 20 bp, Artificial Sequence
  Chr12_5 Reverse Primer
cagaccctggaatgtttgct

SEQ ID NO: 12100 - DNA, 20 bp, Artificial Sequence
  Chr12_5 Reverse Primer
atgcactctgctgtcgattg

SEQ ID NO: 12101 - DNA, 21 bp, Artificial Sequence
  Chr12_5 Reverse Primer
gcatttaaaccaaatgcaagg

SEQ ID NO: 12102 - DNA, 20 bp, Artificial Sequence
  Chr12_5 Reverse Primer
cacacatccacataccaccg

SEQ ID NO: 12103 - DNA, 22 bp, Artificial Sequence
  Chr12_5 Reverse Primer
ctaaattatcaggaacggagca

SEQ ID NO: 12104 - DNA, 21 bp, Artificial Sequence
  Chr12_5 Reverse Primer
cagggaagggaagaataacca

SEQ ID NO: 12105 - DNA, 20 bp, Artificial Sequence
  Chr12_5 Reverse Primer
ttcctgcttccaatttggtc

SEQ ID NO: 12106 - DNA, 20 bp, Artificial Sequence
  Chr12_5 Reverse Primer
caggagcttggagtattcgg

SEQ ID NO: 12107 - DNA, 21 bp, Artificial Sequence
  Chr12_5 Reverse Primer
ccgtaaaaggcttgaaaatga

SEQ ID NO: 12108 - DNA, 20 bp, Artificial Sequence
  Chr12_5 Reverse Primer
agaccacagatatggggcag

SEQ ID NO: 12109 - DNA, 20 bp, Artificial Sequence
  Chr12_5 Reverse Primer
aaatgcaggtgatcgtttcc

SEQ ID NO: 12110 - DNA, 21 bp, Artificial Sequence
  Chr12_5 Reverse Primer
ccgctgcatgaagttttactc

SEQ ID NO: 12111 - DNA, 22 bp, Artificial Sequence
  Chr12_5 Reverse Primer
ttcacattgtcaccatacgtca

SEQ ID NO: 12112 - DNA, 20 bp, Artificial Sequence
  Chr12_5 Reverse Primer
ttccagggtgatatcttgcc

SEQ ID NO: 12113 - DNA, 20 bp, Artificial Sequence
  Chr12_6 Forward Primer
cctgtcccaaggatcagttc

SEQ ID NO: 12114 - DNA, 20 bp, Artificial Sequence
  Chr12_6 Forward Primer
tccagccacactaatggaga

SEQ ID NO: 12115 - DNA, 20 bp, Artificial Sequence
  Chr12_6 Forward Primer
ctcatgatgcctttgtccag

SEQ ID NO: 12116 - DNA, 20 bp, Artificial Sequence
  Chr12_6 Forward Primer
tccatcccagaacttgcttt

SEQ ID NO: 12117 - DNA, 20 bp, Artificial Sequence
  Chr12_6 Forward Primer
ttagagactgcaagagcccc

SEQ ID NO: 12118 - DNA, 20 bp, Artificial Sequence
  Chr12_6 Forward Primer
cgggacaccaagtgaaagtt

SEQ ID NO: 12119 - DNA, 20 bp, Artificial Sequence
  Chr12_6 Forward Primer
tctgggtttgagtcccagtt

SEQ ID NO: 12120 - DNA, 20 bp, Artificial Sequence
  Chr12_6 Forward Primer
ttcacccttctgcatcttcc

SEQ ID NO: 12121 - DNA, 20 bp, Artificial Sequence
  Chr12_6 Forward Primer
agtcgtcccttactccacca

SEQ ID NO: 12122 - DNA, 23 bp, Artificial Sequence
  Chr12_6 Forward Primer
cctcctactcttttgaaatgtgg

SEQ ID NO: 12123 - DNA, 20 bp, Artificial Sequence
  Chr12_6 Forward Primer
cctgaatccctactgtccca

SEQ ID NO: 12124 - DNA, 20 bp, Artificial Sequence
  Chr12_6 Forward Primer
ccatgtcccaggacttctgt

SEQ ID NO: 12125 - DNA, 20 bp, Artificial Sequence
  Chr12_6 Forward Primer
tctcctccagccagtgagtt

SEQ ID NO: 12126 - DNA, 20 bp, Artificial Sequence
  Chr12_6 Forward Primer
aggtcagctggaagcagaag

SEQ ID NO: 12127 - DNA, 20 bp, Artificial Sequence
  Chr12_6 Forward Primer
atcggccccttttcttacag

SEQ ID NO: 12128 - DNA, 20 bp, Artificial Sequence
  Chr12_6 Forward Primer
tccaaatggaccccagaata

SEQ ID NO: 12129 - DNA, 20 bp, Artificial Sequence
  Chr12_6 Forward Primer
tccttctgctcttgcactga

SEQ ID NO: 12130 - DNA, 20 bp, Artificial Sequence
  Chr12_6 Forward Primer
tgctatattgtgctgctgcc

SEQ ID NO: 12131 - DNA, 20 bp, Artificial Sequence
  Chr12_6 Forward Primer
attgcagaagaaggcaggtg

SEQ ID NO: 12132 - DNA, 20 bp, Artificial Sequence
  Chr12_6 Forward Primer
tgagccataggcacaattca

SEQ ID NO: 12133 - DNA, 20 bp, Artificial Sequence
  Chr12_6 Forward Primer
ccgattccttccatttcaga

SEQ ID NO: 12134 - DNA, 20 bp, Artificial Sequence
  Chr12_6 Forward Primer
aataggagggtttgccatca

SEQ ID NO: 12135 - DNA, 20 bp, Artificial Sequence
  Chr12_6 Forward Primer
tctttctcttcccttgggct

SEQ ID NO: 12136 - DNA, 20 bp, Artificial Sequence
  Chr12_6 Forward Primer
gcttcaggctgtgtctctcc

SEQ ID NO: 12137 - DNA, 20 bp, Artificial Sequence
  Chr12_6 Forward Primer
ttggaagaccagatgttgcc

SEQ ID NO: 12138 - DNA, 20 bp, Artificial Sequence
  Chr12_6 Forward Primer
gttctgggtttctgctcagg

SEQ ID NO: 12139 - DNA, 20 bp, Artificial Sequence
  Chr12_6 Forward Primer
gtgaatacaatgggcagcct

SEQ ID NO: 12140 - DNA, 20 bp, Artificial Sequence
  Chr12_6 Forward Primer
ggcagtgaagggtaaatgga

SEQ ID NO: 12141 - DNA, 20 bp, Artificial Sequence
  Chr12_6 Forward Primer
cagcgttttacagctccaca

SEQ ID NO: 12142 - DNA, 20 bp, Artificial Sequence
  Chr12_6 Forward Primer
cagcaaaacaaggagcatca

SEQ ID NO: 12143 - DNA, 20 bp, Artificial Sequence
  Chr12_6 Forward Primer
ctcactggtgtttcagcagc

SEQ ID NO: 12144 - DNA, 20 bp, Artificial Sequence
  Chr12_6 Forward Primer
tctgggttgttcacaggtca

SEQ ID NO: 12145 - DNA, 20 bp, Artificial Sequence
  Chr12_6 Forward Primer
aagcccaccctaaccctatg

SEQ ID NO: 12146 - DNA, 20 bp, Artificial Sequence
  Chr12_6 Forward Primer
gatgatcgctcccttcatgt

SEQ ID NO: 12147 - DNA, 20 bp, Artificial Sequence
  Chr12_6 Forward Primer
cacctaattccctgttccca

SEQ ID NO: 12148 - DNA, 20 bp, Artificial Sequence
  Chr12_6 Forward Primer
tcagaccaactgctcctcct

SEQ ID NO: 12149 - DNA, 20 bp, Artificial Sequence
  Chr12_6 Forward Primer
accacctttcctcaaagcct

SEQ ID NO: 12150 - DNA, 20 bp, Artificial Sequence
  Chr12_6 Forward Primer
ttcttccttcagggacatgg

SEQ ID NO: 12151 - DNA, 20 bp, Artificial Sequence
  Chr12_6 Forward Primer
ccttgtctcatgcacacctc

SEQ ID NO: 12152 - DNA, 20 bp, Artificial Sequence
  Chr12_6 Forward Primer
cccctccttcctgtattcct

SEQ ID NO: 12153 - DNA, 20 bp, Artificial Sequence
  Chr12_6 Forward Primer
agtgaggcaggagtcaagga

SEQ ID NO: 12154 - DNA, 20 bp, Artificial Sequence
  Chr12_6 Forward Primer
taggtgtctgggcaaaggac

SEQ ID NO: 12155 - DNA, 20 bp, Artificial Sequence
  Chr12_6 Forward Primer
actatattcccaccccaccc

SEQ ID NO: 12156 - DNA, 20 bp, Artificial Sequence
  Chr12_6 Forward Primer
aacccctttaccgaaggaaa

SEQ ID NO: 12157 - DNA, 20 bp, Artificial Sequence
  Chr12_6 Forward Primer
ggcatttagctggaccttga

SEQ ID NO: 12158 - DNA, 20 bp, Artificial Sequence
  Chr12_6 Forward Primer
cccacagggtgtacacaaca

SEQ ID NO: 12159 - DNA, 20 bp, Artificial Sequence
  Chr12_6 Forward Primer
gggatctccaggttggaagt

SEQ ID NO: 12160 - DNA, 20 bp, Artificial Sequence
  Chr12_6 Forward Primer
gcctttgtaccagcagagga

SEQ ID NO: 12161 - DNA, 20 bp, Artificial Sequence
  Chr12_6 Forward Primer
aaataaatttgctggcaccg

SEQ ID NO: 12162 - DNA, 21 bp, Artificial Sequence
  Chr12_6 Forward Primer
caacatgctccctcacttctc

SEQ ID NO: 12163 - DNA, 22 bp, Artificial Sequence
  Chr12_6 Forward Primer
tggtttaatgcatggtgatttt

SEQ ID NO: 12164 - DNA, 20 bp, Artificial Sequence
  Chr12_6 Forward Primer
tgagacttcctcatggtccc

SEQ ID NO: 12165 - DNA, 20 bp, Artificial Sequence
  Chr12_6 Forward Primer
tggctgtgtaagagccacac

SEQ ID NO: 12166 - DNA, 20 bp, Artificial Sequence
  Chr12_6 Forward Primer
cagtgggaaggccagagtag

SEQ ID NO: 12167 - DNA, 20 bp, Artificial Sequence
  Chr12_6 Forward Primer
ctaaggttcggggaggtcac

SEQ ID NO: 12168 - DNA, 20 bp, Artificial Sequence
  Chr12_6 Forward Primer
tgtggactctcctctttgcc

SEQ ID NO: 12169 - DNA, 21 bp, Artificial Sequence
  Chr12_6 Forward Primer
tgagggaaaaagacatttcca

SEQ ID NO: 12170 - DNA, 20 bp, Artificial Sequence
  Chr12_6 Forward Primer
aaggcccttcttgattggat

SEQ ID NO: 12171 - DNA, 20 bp, Artificial Sequence
  Chr12_6 Forward Primer
aacgcccagttcctcataca

SEQ ID NO: 12172 - DNA, 20 bp, Artificial Sequence
  Chr12_6 Forward Primer
ccctgggaaagaggtgctat

SEQ ID NO: 12173 - DNA, 20 bp, Artificial Sequence
  Chr12_6 Forward Primer
ggagcagattcaactttggg

SEQ ID NO: 12174 - DNA, 20 bp, Artificial Sequence
  Chr12_6 Forward Primer
caacttaggctcaggatggc

SEQ ID NO: 12175 - DNA, 20 bp, Artificial Sequence
  Chr12_6 Forward Primer
ttcaagcctgcaaaggaaag

SEQ ID NO: 12176 - DNA, 20 bp, Artificial Sequence
  Chr12_6 Forward Primer
atgcttctggccactatgct

SEQ ID NO: 12177 - DNA, 20 bp, Artificial Sequence
  Chr12_6 Forward Primer
acacctcttcctcccaacct

SEQ ID NO: 12178 - DNA, 20 bp, Artificial Sequence
  Chr12_6 Forward Primer
acctcacaaaacacccatcc

SEQ ID NO: 12179 - DNA, 20 bp, Artificial Sequence
  Chr12_6 Forward Primer
cagggaaagaacaaagcagg

SEQ ID NO: 12180 - DNA, 20 bp, Artificial Sequence
  Chr12_6 Forward Primer
tcaacctcaactccgtttcc

SEQ ID NO: 12181 - DNA, 20 bp, Artificial Sequence
  Chr12_6 Forward Primer
ctgaggcagcccagataaag

SEQ ID NO: 12182 - DNA, 20 bp, Artificial Sequence
  Chr12_6 Forward Primer
tgaggccaataatgagtcca

SEQ ID NO: 12183 - DNA, 20 bp, Artificial Sequence
  Chr12_6 Forward Primer
tccactttgggtcataggct

SEQ ID NO: 12184 - DNA, 20 bp, Artificial Sequence
  Chr12_6 Forward Primer
tggatcacacgattcagctc

SEQ ID NO: 12185 - DNA, 21 bp, Artificial Sequence
  Chr12_6 Forward Primer
tgagacaactcctgcaagaca

SEQ ID NO: 12186 - DNA, 20 bp, Artificial Sequence
  Chr12_6 Forward Primer
gaaggcacattctctccagg

SEQ ID NO: 12187 - DNA, 20 bp, Artificial Sequence
  Chr12_6 Forward Primer
acctgcaggaaagcagaaac

SEQ ID NO: 12188 - DNA, 22 bp, Artificial Sequence
  Chr12_6 Forward Primer
gctacatgctgcttcatgatct

SEQ ID NO: 12189 - DNA, 20 bp, Artificial Sequence
  Chr12_6 Forward Primer
ccaatagcaaagcgcataca

SEQ ID NO: 12190 - DNA, 20 bp, Artificial Sequence
  Chr12_6 Forward Primer
ctcccctctgacagcaaaag

SEQ ID NO: 12191 - DNA, 20 bp, Artificial Sequence
  Chr12_6 Forward Primer
ctttaggtcgaccacgaacc

SEQ ID NO: 12192 - DNA, 20 bp, Artificial Sequence
  Chr12_6 Forward Primer
gtcctgcgctggtagttgat

SEQ ID NO: 12193 - DNA, 20 bp, Artificial Sequence
  Chr12_6 Forward Primer
tgcatgcaagattggttcat

SEQ ID NO: 12194 - DNA, 20 bp, Artificial Sequence
  Chr12_6 Forward Primer
ctcagaaggagctctctggc

SEQ ID NO: 12195 - DNA, 20 bp, Artificial Sequence
  Chr12_6 Forward Primer
caggagacagacaccagcaa

SEQ ID NO: 12196 - DNA, 21 bp, Artificial Sequence
  Chr12_6 Forward Primer
tgctatttttctccccatttg

SEQ ID NO: 12197 - DNA, 20 bp, Artificial Sequence
  Chr12_6 Forward Primer
acagagagctctgagggcag

SEQ ID NO: 12198 - DNA, 20 bp, Artificial Sequence
  Chr12_6 Forward Primer
agactcaaaggggagaagcc

SEQ ID NO: 12199 - DNA, 20 bp, Artificial Sequence
  Chr12_6 Forward Primer
cactaaaatccttcggctgc

SEQ ID NO: 12200 - DNA, 20 bp, Artificial Sequence
  Chr12_6 Forward Primer
ccaaaaacagaccttggcag

SEQ ID NO: 12201 - DNA, 20 bp, Artificial Sequence
  Chr12_6 Forward Primer
tatgcaaagagcatcccaca

SEQ ID NO: 12202 - DNA, 20 bp, Artificial Sequence
  Chr12_6 Forward Primer
gaaccacatgcaggaaaggt

SEQ ID NO: 12203 - DNA, 20 bp, Artificial Sequence
  Chr12_6 Forward Primer
tatgtgcccaaagtcatcca

SEQ ID NO: 12204 - DNA, 20 bp, Artificial Sequence
  Chr12_6 Forward Primer
tgaaaggtcttctggttgcc

SEQ ID NO: 12205 - DNA, 20 bp, Artificial Sequence
  Chr12_6 Forward Primer
gcatgtgcttgtgtgtttcc

SEQ ID NO: 12206 - DNA, 20 bp, Artificial Sequence
  Chr12_6 Forward Primer
gcaggtgtggtgatgttttg

SEQ ID NO: 12207 - DNA, 20 bp, Artificial Sequence
  Chr12_6 Forward Primer
tggacagcaaagaaggaggt

SEQ ID NO: 12208 - DNA, 20 bp, Artificial Sequence
  Chr12_6 Forward Primer
gcccatttcctcatcttgtg

SEQ ID NO: 12209 - DNA, 20 bp, Artificial Sequence
  Chr12_6 Reverse Primer
gtggtgtaccgcagtagcct

SEQ ID NO: 12210 - DNA, 20 bp, Artificial Sequence
  Chr12_6 Reverse Primer
ctcgaggaagaggaggaggt

SEQ ID NO: 12211 - DNA, 25 bp, Artificial Sequence
  Chr12_6 Reverse Primer
agatttttaatggctattagcttga

SEQ ID NO: 12212 - DNA, 20 bp, Artificial Sequence
  Chr12_6 Reverse Primer
ttcattgttgaactggggtg

SEQ ID NO: 12213 - DNA, 20 bp, Artificial Sequence
  Chr12_6 Reverse Primer
tgggaagaaaagagccaaga

SEQ ID NO: 12214 - DNA, 20 bp, Artificial Sequence
  Chr12_6 Reverse Primer
gccacatggacagaggaagt

SEQ ID NO: 12215 - DNA, 20 bp, Artificial Sequence
  Chr12_6 Reverse Primer
gacagtaacatggcaagggg

SEQ ID NO: 12216 - DNA, 22 bp, Artificial Sequence
  Chr12_6 Reverse Primer
gacacattttgctttggattga

SEQ ID NO: 12217 - DNA, 21 bp, Artificial Sequence
  Chr12_6 Reverse Primer
tttcaaaaattggtgaatggg

SEQ ID NO: 12218 - DNA, 21 bp, Artificial Sequence
  Chr12_6 Reverse Primer
aaattgaggataccagttgcg

SEQ ID NO: 12219 - DNA, 20 bp, Artificial Sequence
  Chr12_6 Reverse Primer
tggccaatagacgagctttt

SEQ ID NO: 12220 - DNA, 20 bp, Artificial Sequence
  Chr12_6 Reverse Primer
aacaggtccatgaaaggctg

SEQ ID NO: 12221 - DNA, 20 bp, Artificial Sequence
  Chr12_6 Reverse Primer
gtcctcttgagcagcctgag

SEQ ID NO: 12222 - DNA, 20 bp, Artificial Sequence
  Chr12_6 Reverse Primer
tatgaaggaatgccctggag

SEQ ID NO: 12223 - DNA, 20 bp, Artificial Sequence
  Chr12_6 Reverse Primer
tgagcagaggacacatcctg

SEQ ID NO: 12224 - DNA, 20 bp, Artificial Sequence
  Chr12_6 Reverse Primer
tagttgggaacacacagcca

SEQ ID NO: 12225 - DNA, 20 bp, Artificial Sequence
  Chr12_6 Reverse Primer
gaagttgggtaagaaggggg

SEQ ID NO: 12226 - DNA, 20 bp, Artificial Sequence
  Chr12_6 Reverse Primer
atgcaggaagccttgaaaga

SEQ ID NO: 12227 - DNA, 20 bp, Artificial Sequence
  Chr12_6 Reverse Primer
tggagcaatcaggtcattca

SEQ ID NO: 12228 - DNA, 20 bp, Artificial Sequence
  Chr12_6 Reverse Primer
caaatccctcagtccacagg

SEQ ID NO: 12229 - DNA, 20 bp, Artificial Sequence
  Chr12_6 Reverse Primer
cgtacctgtttgcccttctc

SEQ ID NO: 12230 - DNA, 24 bp, Artificial Sequence
  Chr12_6 Reverse Primer
gaccaggatctgagaaactttgtt

SEQ ID NO: 12231 - DNA, 20 bp, Artificial Sequence
  Chr12_6 Reverse Primer
gtctaggcatgagccaggag

SEQ ID NO: 12232 - DNA, 20 bp, Artificial Sequence
  Chr12_6 Reverse Primer
cctctcctgaaagaggggtc

SEQ ID NO: 12233 - DNA, 20 bp, Artificial Sequence
  Chr12_6 Reverse Primer
gaccaggcagtggaaaatgt

SEQ ID NO: 12234 - DNA, 20 bp, Artificial Sequence
  Chr12_6 Reverse Primer
ggcctttctagtgggtgaca

SEQ ID NO: 12235 - DNA, 20 bp, Artificial Sequence
  Chr12_6 Reverse Primer
tgcagggatcctgggtatag

SEQ ID NO: 12236 - DNA, 20 bp, Artificial Sequence
  Chr12_6 Reverse Primer
cttactggctcccctccttc

SEQ ID NO: 12237 - DNA, 20 bp, Artificial Sequence
  Chr12_6 Reverse Primer
acaaggctgttaggtgggtg

SEQ ID NO: 12238 - DNA, 20 bp, Artificial Sequence
  Chr12_6 Reverse Primer
cgtctcccaacctcatcatc

SEQ ID NO: 12239 - DNA, 20 bp, Artificial Sequence
  Chr12_6 Reverse Primer
tttccaccagggtagagcag

SEQ ID NO: 12240 - DNA, 20 bp, Artificial Sequence
  Chr12_6 Reverse Primer
catgatcaggtggcaagatg

SEQ ID NO: 12241 - DNA, 19 bp, Artificial Sequence
  Chr12_6 Reverse Primer
gaaggactgcttccttggg

SEQ ID NO: 12242 - DNA, 20 bp, Artificial Sequence
  Chr12_6 Reverse Primer
tcccagaaggatgtggtttc

SEQ ID NO: 12243 - DNA, 20 bp, Artificial Sequence
  Chr12_6 Reverse Primer
ctgggctcctgctctgttac

SEQ ID NO: 12244 - DNA, 20 bp, Artificial Sequence
  Chr12_6 Reverse Primer
tcattggcacttctgacctg

SEQ ID NO: 12245 - DNA, 24 bp, Artificial Sequence
  Chr12_6 Reverse Primer
ccattcattattagcattcacaga

SEQ ID NO: 12246 - DNA, 20 bp, Artificial Sequence
  Chr12_6 Reverse Primer
ccaacaacccagacattcct

SEQ ID NO: 12247 - DNA, 20 bp, Artificial Sequence
  Chr12_6 Reverse Primer
ggtcatcagtcaaggggaga

SEQ ID NO: 12248 - DNA, 20 bp, Artificial Sequence
  Chr12_6 Reverse Primer
caccgtgttgattgcttgag

SEQ ID NO: 12249 - DNA, 20 bp, Artificial Sequence
  Chr12_6 Reverse Primer
ttctcatctgggtcaggctt

SEQ ID NO: 12250 - DNA, 20 bp, Artificial Sequence
  Chr12_6 Reverse Primer
tcagccacagccatagacag

SEQ ID NO: 12251 - DNA, 20 bp, Artificial Sequence
  Chr12_6 Reverse Primer
gtctctggcaggctgagttc

SEQ ID NO: 12252 - DNA, 20 bp, Artificial Sequence
  Chr12_6 Reverse Primer
gggggcatgccttatttatt

SEQ ID NO: 12253 - DNA, 21 bp, Artificial Sequence
  Chr12_6 Reverse Primer
tgaaaaattgcacaaacagca

SEQ ID NO: 12254 - DNA, 20 bp, Artificial Sequence
  Chr12_6 Reverse Primer
cccaagattcccagactcaa

SEQ ID NO: 12255 - DNA, 20 bp, Artificial Sequence
  Chr12_6 Reverse Primer
gtcagcctcttcttgcttgg

SEQ ID NO: 12256 - DNA, 20 bp, Artificial Sequence
  Chr12_6 Reverse Primer
tatctgctggagggaacctg

SEQ ID NO: 12257 - DNA, 20 bp, Artificial Sequence
  Chr12_6 Reverse Primer
gggtccagatttgggtaggt

SEQ ID NO: 12258 - DNA, 20 bp, Artificial Sequence
  Chr12_6 Reverse Primer
tggacccctgaattgtgtaa

SEQ ID NO: 12259 - DNA, 23 bp, Artificial Sequence
  Chr12_6 Reverse Primer
tgttaggaagagaaagaaaggca

SEQ ID NO: 12260 - DNA, 20 bp, Artificial Sequence
  Chr12_6 Reverse Primer
ctatcccaactcctccccat

SEQ ID NO: 12261 - DNA, 20 bp, Artificial Sequence
  Chr12_6 Reverse Primer
tctagatccatgtgcctccc

SEQ ID NO: 12262 - DNA, 20 bp, Artificial Sequence
  Chr12_6 Reverse Primer
aatactcagcaggagggcaa

SEQ ID NO: 12263 - DNA, 20 bp, Artificial Sequence
  Chr12_6 Reverse Primer
gtcatcagcatttggagggt

SEQ ID NO: 12264 - DNA, 20 bp, Artificial Sequence
  Chr12_6 Reverse Primer
tccatattggaggcaggaag

SEQ ID NO: 12265 - DNA, 20 bp, Artificial Sequence
  Chr12_6 Reverse Primer
ggcttctgggtcacaagttc

SEQ ID NO: 12266 - DNA, 20 bp, Artificial Sequence
  Chr12_6 Reverse Primer
ttgaaagtgatgcttggcag

SEQ ID NO: 12267 - DNA, 20 bp, Artificial Sequence
  Chr12_6 Reverse Primer
tgcagggaaacttaccaagg

SEQ ID NO: 12268 - DNA, 20 bp, Artificial Sequence
  Chr12_6 Reverse Primer
tgtccagcattagcttgtgg

SEQ ID NO: 12269 - DNA, 21 bp, Artificial Sequence
  Chr12_6 Reverse Primer
cgtgaaaacctttgtgaattg

SEQ ID NO: 12270 - DNA, 20 bp, Artificial Sequence
  Chr12_6 Reverse Primer
gtgagtccagcagtgggttt

SEQ ID NO: 12271 - DNA, 20 bp, Artificial Sequence
  Chr12_6 Reverse Primer
cccacagggctaatggaata

SEQ ID NO: 12272 - DNA, 20 bp, Artificial Sequence
  Chr12_6 Reverse Primer
gggtcagcagttactggagc

SEQ ID NO: 12273 - DNA, 20 bp, Artificial Sequence
  Chr12_6 Reverse Primer
atgggaaagtcatgcacaca

SEQ ID NO: 12274 - DNA, 20 bp, Artificial Sequence
  Chr12_6 Reverse Primer
ggtgtggacagctccttagc

SEQ ID NO: 12275 - DNA, 20 bp, Artificial Sequence
  Chr12_6 Reverse Primer
tctcccccagcatcactaac

SEQ ID NO: 12276 - DNA, 20 bp, Artificial Sequence
  Chr12_6 Reverse Primer
ccagatggggaaagtcttca

SEQ ID NO: 12277 - DNA, 20 bp, Artificial Sequence
  Chr12_6 Reverse Primer
tccttgcaagctgattgttg

SEQ ID NO: 12278 - DNA, 20 bp, Artificial Sequence
  Chr12_6 Reverse Primer
gcagccaggaggttttagag

SEQ ID NO: 12279 - DNA, 20 bp, Artificial Sequence
  Chr12_6 Reverse Primer
gggggtaaccctcaggtaaa

SEQ ID NO: 12280 - DNA, 20 bp, Artificial Sequence
  Chr12_6 Reverse Primer
gaaagcctagccagtttccc

SEQ ID NO: 12281 - DNA, 22 bp, Artificial Sequence
  Chr12_6 Reverse Primer
ccttacagcactctaccaagca

SEQ ID NO: 12282 - DNA, 20 bp, Artificial Sequence
  Chr12_6 Reverse Primer
tctccatatttcccagcacc

SEQ ID NO: 12283 - DNA, 22 bp, Artificial Sequence
  Chr12_6 Reverse Primer
ggcacatcagtttgacattttc

SEQ ID NO: 12284 - DNA, 22 bp, Artificial Sequence
  Chr12_6 Reverse Primer
agtcattcatcaacaatctccg

SEQ ID NO: 12285 - DNA, 20 bp, Artificial Sequence
  Chr12_6 Reverse Primer
gccaatccaaggttatccac

SEQ ID NO: 12286 - DNA, 20 bp, Artificial Sequence
  Chr12_6 Reverse Primer
gagcggaattgggactcata

SEQ ID NO: 12287 - DNA, 20 bp, Artificial Sequence
  Chr12_6 Reverse Primer
ctcattgcactggtagggct

SEQ ID NO: 12288 - DNA, 20 bp, Artificial Sequence
  Chr12_6 Reverse Primer
aagcccaatttcttccctgt

SEQ ID NO: 12289 - DNA, 20 bp, Artificial Sequence
  Chr12_6 Reverse Primer
cacctgctgtgcatggtaag

SEQ ID NO: 12290 - DNA, 20 bp, Artificial Sequence
  Chr12_6 Reverse Primer
cttccagaccacccactcat

SEQ ID NO: 12291 - DNA, 20 bp, Artificial Sequence
  Chr12_6 Reverse Primer
ttcccttccaaatctgcatt

SEQ ID NO: 12292 - DNA, 20 bp, Artificial Sequence
  Chr12_6 Reverse Primer
gctttacacacagcaggcag

SEQ ID NO: 12293 - DNA, 20 bp, Artificial Sequence
  Chr12_6 Reverse Primer
gtgctgctctccaggaagac

SEQ ID NO: 12294 - DNA, 20 bp, Artificial Sequence
  Chr12_6 Reverse Primer
ggacaaggttcaatagcgga

SEQ ID NO: 12295 - DNA, 20 bp, Artificial Sequence
  Chr12_6 Reverse Primer
cacccctccaaaatgctaga

SEQ ID NO: 12296 - DNA, 20 bp, Artificial Sequence
  Chr12_6 Reverse Primer
gggtgagctgtgcaaatgta

SEQ ID NO: 12297 - DNA, 20 bp, Artificial Sequence
  Chr12_6 Reverse Primer
ttgcctgtctttgagcctct

SEQ ID NO: 12298 - DNA, 21 bp, Artificial Sequence
  Chr12_6 Reverse Primer
tgccttttctttaaaatgggg

SEQ ID NO: 12299 - DNA, 20 bp, Artificial Sequence
  Chr12_6 Reverse Primer
tggaaagggaagaagagggt

SEQ ID NO: 12300 - DNA, 20 bp, Artificial Sequence
  Chr12_6 Reverse Primer
gaggaaaactccctggagga

SEQ ID NO: 12301 - DNA, 20 bp, Artificial Sequence
  Chr12_6 Reverse Primer
ggcagcctcatctcaatgat

SEQ ID NO: 12302 - DNA, 20 bp, Artificial Sequence
  Chr12_6 Reverse Primer
cctggctgctttcaacatct

SEQ ID NO: 12303 - DNA, 20 bp, Artificial Sequence
  Chr12_6 Reverse Primer
aggctcagagagggtcagtg

SEQ ID NO: 12304 - DNA, 20 bp, Artificial Sequence
  Chr12_6 Reverse Primer
agccctcagtgtttgtgctc

SEQ ID NO: 12305 - DNA, 20 bp, Artificial Sequence
  Chr12_7 Forward Primer
agtgtcaatgactccccgtc

SEQ ID NO: 12306 - DNA, 20 bp, Artificial Sequence
  Chr12_7 Forward Primer
accccactaactctggggac

SEQ ID NO: 12307 - DNA, 20 bp, Artificial Sequence
  Chr12_7 Forward Primer
ggcattgataaccctggaga

SEQ ID NO: 12308 - DNA, 20 bp, Artificial Sequence
  Chr12_7 Forward Primer
ttttgagacctgttcaccca

SEQ ID NO: 12309 - DNA, 20 bp, Artificial Sequence
  Chr12_7 Forward Primer
caagcaaatgggtcaaaggt

SEQ ID NO: 12310 - DNA, 20 bp, Artificial Sequence
  Chr12_7 Forward Primer
ttctccttgatctgccactg

SEQ ID NO: 12311 - DNA, 20 bp, Artificial Sequence
  Chr12_7 Forward Primer
tgagtgccgcaagatgtaag

SEQ ID NO: 12312 - DNA, 20 bp, Artificial Sequence
  Chr12_7 Forward Primer
ataaaaagggcttcgctggt

SEQ ID NO: 12313 - DNA, 20 bp, Artificial Sequence
  Chr12_7 Forward Primer
caatgaggctacctgcatga

SEQ ID NO: 12314 - DNA, 20 bp, Artificial Sequence
  Chr12_7 Forward Primer
gcatctctggctattggagg

SEQ ID NO: 12315 - DNA, 19 bp, Artificial Sequence
  Chr12_7 Forward Primer
cctcctctcggtcactggt

SEQ ID NO: 12316 - DNA, 20 bp, Artificial Sequence
  Chr12_7 Forward Primer
ccactggcacctaatcttgg

SEQ ID NO: 12317 - DNA, 20 bp, Artificial Sequence
  Chr12_7 Forward Primer
cgcaaggtcacacagctaaa

SEQ ID NO: 12318 - DNA, 20 bp, Artificial Sequence
  Chr12_7 Forward Primer
tggtcccacctatgtaagcc

SEQ ID NO: 12319 - DNA, 20 bp, Artificial Sequence
  Chr12_7 Forward Primer
cacaagctgaggagcagcat

SEQ ID NO: 12320 - DNA, 24 bp, Artificial Sequence
  Chr12_7 Forward Primer
gaatctgacagaaatcaactctgc

SEQ ID NO: 12321 - DNA, 20 bp, Artificial Sequence
  Chr12_7 Forward Primer
ttgtgtgtgtgtgtgttggg

SEQ ID NO: 12322 - DNA, 21 bp, Artificial Sequence
  Chr12_7 Forward Primer
cccctaagatttttccctttg

SEQ ID NO: 12323 - DNA, 20 bp, Artificial Sequence
  Chr12_7 Forward Primer
agtggtcctgtcacaaaggc

SEQ ID NO: 12324 - DNA, 20 bp, Artificial Sequence
  Chr12_7 Forward Primer
tccagctatgggtacttggg

SEQ ID NO: 12325 - DNA, 19 bp, Artificial Sequence
  Chr12_7 Forward Primer
acatggccagacatccaga

SEQ ID NO: 12326 - DNA, 23 bp, Artificial Sequence
  Chr12_7 Forward Primer
tgacaaatgtttaaggacaggtg

SEQ ID NO: 12327 - DNA, 20 bp, Artificial Sequence
  Chr12_7 Forward Primer
ggtgtttggctttcacgttt

SEQ ID NO: 12328 - DNA, 20 bp, Artificial Sequence
  Chr12_7 Forward Primer
atcagctggacctgaggaga

SEQ ID NO: 12329 - DNA, 20 bp, Artificial Sequence
  Chr12_7 Forward Primer
ttggcccttctcacaaaaac

SEQ ID NO: 12330 - DNA, 26 bp, Artificial Sequence
  Chr12_7 Forward Primer
gatgttgtgaagtttataaagaggtg

SEQ ID NO: 12331 - DNA, 20 bp, Artificial Sequence
  Chr12_7 Forward Primer
aggaagaactcaggcagggt

SEQ ID NO: 12332 - DNA, 21 bp, Artificial Sequence
  Chr12_7 Forward Primer
aaacgtgtactgacccctgaa

SEQ ID NO: 12333 - DNA, 21 bp, Artificial Sequence
  Chr12_7 Forward Primer
cccccataaatatcagcgttt

SEQ ID NO: 12334 - DNA, 21 bp, Artificial Sequence
  Chr12_7 Forward Primer
caaaataaacgccaatccaaa

SEQ ID NO: 12335 - DNA, 20 bp, Artificial Sequence
  Chr12_7 Forward Primer
caaaaatcccagacaccacc

SEQ ID NO: 12336 - DNA, 22 bp, Artificial Sequence
  Chr12_7 Forward Primer
aggtaaatgtcctaggtgagcc

SEQ ID NO: 12337 - DNA, 20 bp, Artificial Sequence
  Chr12_7 Forward Primer
tttacctttgtccccagacc

SEQ ID NO: 12338 - DNA, 21 bp, Artificial Sequence
  Chr12_7 Forward Primer
aaggacaaggtggactaccaa

SEQ ID NO: 12339 - DNA, 20 bp, Artificial Sequence
  Chr12_7 Forward Primer
cccctaaacattctccagca

SEQ ID NO: 12340 - DNA, 20 bp, Artificial Sequence
  Chr12_7 Forward Primer
ccaaaagctggcttatgacc

SEQ ID NO: 12341 - DNA, 20 bp, Artificial Sequence
  Chr12_7 Forward Primer
gtggcttgctgttcttcctc

SEQ ID NO: 12342 - DNA, 20 bp, Artificial Sequence
  Chr12_7 Forward Primer
aaggagcatccttgtcctcc

SEQ ID NO: 12343 - DNA, 20 bp, Artificial Sequence
  Chr12_7 Forward Primer
cctgcaatgacctaacctcc

SEQ ID NO: 12344 - DNA, 20 bp, Artificial Sequence
  Chr12_7 Forward Primer
ggccagaggtgactggttta

SEQ ID NO: 12345 - DNA, 20 bp, Artificial Sequence
  Chr12_7 Forward Primer
tcccttgaatggctgtcaat

SEQ ID NO: 12346 - DNA, 20 bp, Artificial Sequence
  Chr12_7 Forward Primer
tgccagttatgaccagagca

SEQ ID NO: 12347 - DNA, 19 bp, Artificial Sequence
  Chr12_7 Forward Primer
atcatcactcccatggcct

SEQ ID NO: 12348 - DNA, 21 bp, Artificial Sequence
  Chr12_7 Forward Primer
tgctggttgcaaaatatcctt

SEQ ID NO: 12349 - DNA, 25 bp, Artificial Sequence
  Chr12_7 Forward Primer
atgactacaaatgcaatctaggaca

SEQ ID NO: 12350 - DNA, 20 bp, Artificial Sequence
  Chr12_7 Forward Primer
gatgactgagttgcactggc

SEQ ID NO: 12351 - DNA, 20 bp, Artificial Sequence
  Chr12_7 Forward Primer
ggggactaggataatgggga

SEQ ID NO: 12352 - DNA, 20 bp, Artificial Sequence
  Chr12_7 Forward Primer
ggtacagggcatctggattg

SEQ ID NO: 12353 - DNA, 20 bp, Artificial Sequence
  Chr12_7 Forward Primer
ttgacctggggtcagatagc

SEQ ID NO: 12354 - DNA, 21 bp, Artificial Sequence
  Chr12_7 Forward Primer
tggcaaagaggttatcagtgg

SEQ ID NO: 12355 - DNA, 20 bp, Artificial Sequence
  Chr12_7 Forward Primer
attggtttgggcaaagatca

SEQ ID NO: 12356 - DNA, 20 bp, Artificial Sequence
  Chr12_7 Forward Primer
tgggctaaacatcacaagga

SEQ ID NO: 12357 - DNA, 25 bp, Artificial Sequence
  Chr12_7 Forward Primer
ggtgaaagatattcaggtacacgtt

SEQ ID NO: 12358 - DNA, 20 bp, Artificial Sequence
  Chr12_7 Forward Primer
cttcttcccatgggtttcct

SEQ ID NO: 12359 - DNA, 20 bp, Artificial Sequence
  Chr12_7 Forward Primer
ctcttaaccgcaatggatgg

SEQ ID NO: 12360 - DNA, 20 bp, Artificial Sequence
  Chr12_7 Forward Primer
ggcatactgtagggcctcaa

SEQ ID NO: 12361 - DNA, 20 bp, Artificial Sequence
  Chr12_7 Forward Primer
tgttttgggaaagaagaggg

SEQ ID NO: 12362 - DNA, 20 bp, Artificial Sequence
  Chr12_7 Forward Primer
taaaacactgctccaagcga

SEQ ID NO: 12363 - DNA, 20 bp, Artificial Sequence
  Chr12_7 Forward Primer
tgtgttacatttggggctga

SEQ ID NO: 12364 - DNA, 20 bp, Artificial Sequence
  Chr12_7 Forward Primer
ggaaagatccctacggcttc

SEQ ID NO: 12365 - DNA, 20 bp, Artificial Sequence
  Chr12_7 Forward Primer
acaacatccctagcacccag

SEQ ID NO: 12366 - DNA, 22 bp, Artificial Sequence
  Chr12_7 Forward Primer
tgggttttgtagttgttaccca

SEQ ID NO: 12367 - DNA, 20 bp, Artificial Sequence
  Chr12_7 Forward Primer
ccttcatgctgaagctcaaa

SEQ ID NO: 12368 - DNA, 20 bp, Artificial Sequence
  Chr12_7 Forward Primer
tttttatggctcccctttga

SEQ ID NO: 12369 - DNA, 21 bp, Artificial Sequence
  Chr12_7 Forward Primer
ggaaaactgaaatgctggtca

SEQ ID NO: 12370 - DNA, 24 bp, Artificial Sequence
  Chr12_7 Forward Primer
cccattttaaagatttcttccttt

SEQ ID NO: 12371 - DNA, 20 bp, Artificial Sequence
  Chr12_7 Forward Primer
ggaagcatgcgatcttcaat

SEQ ID NO: 12372 - DNA, 20 bp, Artificial Sequence
  Chr12_7 Forward Primer
gccacattttggaggaagtt

SEQ ID NO: 12373 - DNA, 20 bp, Artificial Sequence
  Chr12_7 Forward Primer
gagagggcacatccattgtt

SEQ ID NO: 12374 - DNA, 20 bp, Artificial Sequence
  Chr12_7 Forward Primer
cagtgttgaaaggctcagca

SEQ ID NO: 12375 - DNA, 20 bp, Artificial Sequence
  Chr12_7 Forward Primer
tgcctaatggcaacaaaatg

SEQ ID NO: 12376 - DNA, 20 bp, Artificial Sequence
  Chr12_7 Forward Primer
acagcagcagtctctcagca

SEQ ID NO: 12377 - DNA, 20 bp, Artificial Sequence
  Chr12_7 Forward Primer
ggttgctttctcctcgtcag

SEQ ID NO: 12378 - DNA, 20 bp, Artificial Sequence
  Chr12_7 Forward Primer
ctggagagcatgtgtccctt

SEQ ID NO: 12379 - DNA, 20 bp, Artificial Sequence
  Chr12_7 Forward Primer
atggagaagtcgggggttag

SEQ ID NO: 12380 - DNA, 21 bp, Artificial Sequence
  Chr12_7 Forward Primer
tgatccttaggcctctttcaa

SEQ ID NO: 12381 - DNA, 23 bp, Artificial Sequence
  Chr12_7 Forward Primer
tgactcatggcataatcaacttt

SEQ ID NO: 12382 - DNA, 20 bp, Artificial Sequence
  Chr12_7 Forward Primer
ccacaccccattattcacaa

SEQ ID NO: 12383 - DNA, 20 bp, Artificial Sequence
  Chr12_7 Forward Primer
caccgtaccatcaaggtgaa

SEQ ID NO: 12384 - DNA, 20 bp, Artificial Sequence
  Chr12_7 Forward Primer
taagaaggtgggcgcttcta

SEQ ID NO: 12385 - DNA, 22 bp, Artificial Sequence
  Chr12_7 Forward Primer
ttggaaatccaaacctctcttt

SEQ ID NO: 12386 - DNA, 20 bp, Artificial Sequence
  Chr12_7 Forward Primer
aactgtttcccctgcatgac

SEQ ID NO: 12387 - DNA, 20 bp, Artificial Sequence
  Chr12_7 Forward Primer
tgtcactagggagggattgc

SEQ ID NO: 12388 - DNA, 20 bp, Artificial Sequence
  Chr12_7 Forward Primer
ccaagcattctcttccaagc

SEQ ID NO: 12389 - DNA, 20 bp, Artificial Sequence
  Chr12_7 Forward Primer
gggtttggagcactgacttt

SEQ ID NO: 12390 - DNA, 20 bp, Artificial Sequence
  Chr12_7 Forward Primer
ttttggatcattcaccacga

SEQ ID NO: 12391 - DNA, 20 bp, Artificial Sequence
  Chr12_7 Forward Primer
cccctttctccattctgtca

SEQ ID NO: 12392 - DNA, 20 bp, Artificial Sequence
  Chr12_7 Forward Primer
tgcctttatctccatggtcc

SEQ ID NO: 12393 - DNA, 20 bp, Artificial Sequence
  Chr12_7 Forward Primer
ggaatttgcttatgatgccc

SEQ ID NO: 12394 - DNA, 20 bp, Artificial Sequence
  Chr12_7 Forward Primer
tgctcaatctacatccccct

SEQ ID NO: 12395 - DNA, 19 bp, Artificial Sequence
  Chr12_7 Forward Primer
gacggcatccactgaacac

SEQ ID NO: 12396 - DNA, 20 bp, Artificial Sequence
  Chr12_7 Forward Primer
ctgtttgcgcattgtcatct

SEQ ID NO: 12397 - DNA, 25 bp, Artificial Sequence
  Chr12_7 Forward Primer
tggctttagatattaagaacaaggg

SEQ ID NO: 12398 - DNA, 20 bp, Artificial Sequence
  Chr12_7 Forward Primer
cagaattcaaaggggcatgt

SEQ ID NO: 12399 - DNA, 20 bp, Artificial Sequence
  Chr12_7 Forward Primer
tgtatgagctaacccctgcc

SEQ ID NO: 12400 - DNA, 20 bp, Artificial Sequence
  Chr12_7 Forward Primer
atgctcccagtacccaacac

SEQ ID NO: 12401 - DNA, 20 bp, Artificial Sequence
  Chr12_7 Reverse Primer
agcctgtgcctgatgttctt

SEQ ID NO: 12402 - DNA, 20 bp, Artificial Sequence
  Chr12_7 Reverse Primer
tcaaccccaaacaggaactc

SEQ ID NO: 12403 - DNA, 20 bp, Artificial Sequence
  Chr12_7 Reverse Primer
tgggtgctaacataatgcca

SEQ ID NO: 12404 - DNA, 21 bp, Artificial Sequence
  Chr12_7 Reverse Primer
agattgatggtggttttgctg

SEQ ID NO: 12405 - DNA, 20 bp, Artificial Sequence
  Chr12_7 Reverse Primer
cagcatgttttcctgaagca

SEQ ID NO: 12406 - DNA, 20 bp, Artificial Sequence
  Chr12_7 Reverse Primer
aggctgtgcaactcaatcaa

SEQ ID NO: 12407 - DNA, 20 bp, Artificial Sequence
  Chr12_7 Reverse Primer
atgctaaagctgcccaaaat

SEQ ID NO: 12408 - DNA, 20 bp, Artificial Sequence
  Chr12_7 Reverse Primer
agcccctgagagtgtgtgat

SEQ ID NO: 12409 - DNA, 20 bp, Artificial Sequence
  Chr12_7 Reverse Primer
tctatgcttccccacagtcc

SEQ ID NO: 12410 - DNA, 20 bp, Artificial Sequence
  Chr12_7 Reverse Primer
tctgcctggtttggttctct

SEQ ID NO: 12411 - DNA, 20 bp, Artificial Sequence
  Chr12_7 Reverse Primer
gccaagttctggaaatagca

SEQ ID NO: 12412 - DNA, 20 bp, Artificial Sequence
  Chr12_7 Reverse Primer
ccactcagggaaagacagga

SEQ ID NO: 12413 - DNA, 20 bp, Artificial Sequence
  Chr12_7 Reverse Primer
acgttcaacatgaaatggca

SEQ ID NO: 12414 - DNA, 21 bp, Artificial Sequence
  Chr12_7 Reverse Primer
ttgagaagaatgaggcctttc

SEQ ID NO: 12415 - DNA, 20 bp, Artificial Sequence
  Chr12_7 Reverse Primer
gtggtccaccagcatttctt

SEQ ID NO: 12416 - DNA, 22 bp, Artificial Sequence
  Chr12_7 Reverse Primer
gaccaaactactctgccagtca

SEQ ID NO: 12417 - DNA, 20 bp, Artificial Sequence
  Chr12_7 Reverse Primer
ctttgccatgtgtctctccc

SEQ ID NO: 12418 - DNA, 23 bp, Artificial Sequence
  Chr12_7 Reverse Primer
ttttccaagtgtgtgtatcatgg

SEQ ID NO: 12419 - DNA, 20 bp, Artificial Sequence
  Chr12_7 Reverse Primer
tgcactatgctgaatgcctc

SEQ ID NO: 12420 - DNA, 20 bp, Artificial Sequence
  Chr12_7 Reverse Primer
ggtcctgacagaagaggcag

SEQ ID NO: 12421 - DNA, 20 bp, Artificial Sequence
  Chr12_7 Reverse Primer
tgagacctgtgcttctgagg

SEQ ID NO: 12422 - DNA, 20 bp, Artificial Sequence
  Chr12_7 Reverse Primer
aaccacatgagacattgccc

SEQ ID NO: 12423 - DNA, 20 bp, Artificial Sequence
  Chr12_7 Reverse Primer
acctcgttggtcactgctct

SEQ ID NO: 12424 - DNA, 20 bp, Artificial Sequence
  Chr12_7 Reverse Primer
accatctccttgccatcttg

SEQ ID NO: 12425 - DNA, 20 bp, Artificial Sequence
  Chr12_7 Reverse Primer
ctgctgggagagccttttct

SEQ ID NO: 12426 - DNA, 22 bp, Artificial Sequence
  Chr12_7 Reverse Primer
cccattttctactaagccacaa

SEQ ID NO: 12427 - DNA, 20 bp, Artificial Sequence
  Chr12_7 Reverse Primer
cagtggcacctcattctcct

SEQ ID NO: 12428 - DNA, 20 bp, Artificial Sequence
  Chr12_7 Reverse Primer
gcctccaaatggtaaagcaa

SEQ ID NO: 12429 - DNA, 20 bp, Artificial Sequence
  Chr12_7 Reverse Primer
tctacgggaattgttccagc

SEQ ID NO: 12430 - DNA, 21 bp, Artificial Sequence
  Chr12_7 Reverse Primer
aaaaatttctcacattgccga

SEQ ID NO: 12431 - DNA, 20 bp, Artificial Sequence
  Chr12_7 Reverse Primer
ggagtggcctcctatgtgaa

SEQ ID NO: 12432 - DNA, 20 bp, Artificial Sequence
  Chr12_7 Reverse Primer
ctgtgcttgccttggaaaaa

SEQ ID NO: 12433 - DNA, 23 bp, Artificial Sequence
  Chr12_7 Reverse Primer
cgttatttaaggttgacaaaggc

SEQ ID NO: 12434 - DNA, 20 bp, Artificial Sequence
  Chr12_7 Reverse Primer
taggcaggcttagaacaccg

SEQ ID NO: 12435 - DNA, 20 bp, Artificial Sequence
  Chr12_7 Reverse Primer
gacctttggaatttccctcc

SEQ ID NO: 12436 - DNA, 20 bp, Artificial Sequence
  Chr12_7 Reverse Primer
tgcctcagcaagaagtacca

SEQ ID NO: 12437 - DNA, 20 bp, Artificial Sequence
  Chr12_7 Reverse Primer
tgaatatagggttgggcagc

SEQ ID NO: 12438 - DNA, 20 bp, Artificial Sequence
  Chr12_7 Reverse Primer
ggttgagaaaggtcagtccg

SEQ ID NO: 12439 - DNA, 20 bp, Artificial Sequence
  Chr12_7 Reverse Primer
cctccccaagacacacaact

SEQ ID NO: 12440 - DNA, 20 bp, Artificial Sequence
  Chr12_7 Reverse Primer
caaatgggtcttgggaacac

SEQ ID NO: 12441 - DNA, 20 bp, Artificial Sequence
  Chr12_7 Reverse Primer
tcccctgaagtcaacaaacc

SEQ ID NO: 12442 - DNA, 25 bp, Artificial Sequence
  Chr12_7 Reverse Primer
tgctagatttctgaacagcttactg

SEQ ID NO: 12443 - DNA, 20 bp, Artificial Sequence
  Chr12_7 Reverse Primer
tcttatgcttctggttccgc

SEQ ID NO: 12444 - DNA, 20 bp, Artificial Sequence
  Chr12_7 Reverse Primer
acggtgatttggtgttggtt

SEQ ID NO: 12445 - DNA, 20 bp, Artificial Sequence
  Chr12_7 Reverse Primer
acttgggagctttgctcaga

SEQ ID NO: 12446 - DNA, 20 bp, Artificial Sequence
  Chr12_7 Reverse Primer
atgcctcactaggatcccct

SEQ ID NO: 12447 - DNA, 20 bp, Artificial Sequence
  Chr12_7 Reverse Primer
cttgggaaacaagcttcctg

SEQ ID NO: 12448 - DNA, 20 bp, Artificial Sequence
  Chr12_7 Reverse Primer
gttgttgggaggctcaactg

SEQ ID NO: 12449 - DNA, 20 bp, Artificial Sequence
  Chr12_7 Reverse Primer
tcttagcacctggcaccttt

SEQ ID NO: 12450 - DNA, 20 bp, Artificial Sequence
  Chr12_7 Reverse Primer
aggcatggatgctctttcaa

SEQ ID NO: 12451 - DNA, 21 bp, Artificial Sequence
  Chr12_7 Reverse Primer
ggagatgtatcccactcatgc

SEQ ID NO: 12452 - DNA, 20 bp, Artificial Sequence
  Chr12_7 Reverse Primer
agcacaaaccattattgccc

SEQ ID NO: 12453 - DNA, 21 bp, Artificial Sequence
  Chr12_7 Reverse Primer
tgaaactcctcccattcttga

SEQ ID NO: 12454 - DNA, 20 bp, Artificial Sequence
  Chr12_7 Reverse Primer
tcccaatagggctttcagtg

SEQ ID NO: 12455 - DNA, 20 bp, Artificial Sequence
  Chr12_7 Reverse Primer
cccctgtgactaccccaaat

SEQ ID NO: 12456 - DNA, 20 bp, Artificial Sequence
  Chr12_7 Reverse Primer
tgcttttgtgtcattctgcc

SEQ ID NO: 12457 - DNA, 20 bp, Artificial Sequence
  Chr12_7 Reverse Primer
aacacagtggcttttgctga

SEQ ID NO: 12458 - DNA, 20 bp, Artificial Sequence
  Chr12_7 Reverse Primer
gactcttgggcttcattcca

SEQ ID NO: 12459 - DNA, 20 bp, Artificial Sequence
  Chr12_7 Reverse Primer
ttgccagacatgcaaagaag

SEQ ID NO: 12460 - DNA, 21 bp, Artificial Sequence
  Chr12_7 Reverse Primer
tccagaagatcctttcacacc

SEQ ID NO: 12461 - DNA, 20 bp, Artificial Sequence
  Chr12_7 Reverse Primer
caaaccaggaggacaaagga

SEQ ID NO: 12462 - DNA, 20 bp, Artificial Sequence
  Chr12_7 Reverse Primer
gacttgaacccagacccaaa

SEQ ID NO: 12463 - DNA, 20 bp, Artificial Sequence
  Chr12_7 Reverse Primer
ccctcatgaaaccctcacaa

SEQ ID NO: 12464 - DNA, 20 bp, Artificial Sequence
  Chr12_7 Reverse Primer
aaggctctctgtggcagcta

SEQ ID NO: 12465 - DNA, 20 bp, Artificial Sequence
  Chr12_7 Reverse Primer
aaacattttgtcccccatga

SEQ ID NO: 12466 - DNA, 20 bp, Artificial Sequence
  Chr12_7 Reverse Primer
gggatagcatttgctgctgt

SEQ ID NO: 12467 - DNA, 20 bp, Artificial Sequence
  Chr12_7 Reverse Primer
tgaaaacagacatttgggca

SEQ ID NO: 12468 - DNA, 21 bp, Artificial Sequence
  Chr12_7 Reverse Primer
gacatttttgaatgcaaagcc

SEQ ID NO: 12469 - DNA, 20 bp, Artificial Sequence
  Chr12_7 Reverse Primer
tcacctccccagaagacaag

SEQ ID NO: 12470 - DNA, 20 bp, Artificial Sequence
  Chr12_7 Reverse Primer
attttcccacacccagtcag

SEQ ID NO: 12471 - DNA, 20 bp, Artificial Sequence
  Chr12_7 Reverse Primer
aaaatgcctggaaggaaggt

SEQ ID NO: 12472 - DNA, 20 bp, Artificial Sequence
  Chr12_7 Reverse Primer
caaatagaaaaggggatggc

SEQ ID NO: 12473 - DNA, 20 bp, Artificial Sequence
  Chr12_7 Reverse Primer
atgtttgggtctatgccctg

SEQ ID NO: 12474 - DNA, 20 bp, Artificial Sequence
  Chr12_7 Reverse Primer
cattatttggtttgggccag

SEQ ID NO: 12475 - DNA, 20 bp, Artificial Sequence
  Chr12_7 Reverse Primer
agtttgcctctcgcagacat

SEQ ID NO: 12476 - DNA, 20 bp, Artificial Sequence
  Chr12_7 Reverse Primer
aaagtgctgcctctctttgc

SEQ ID NO: 12477 - DNA, 21 bp, Artificial Sequence
  Chr12_7 Reverse Primer
ccttggagagcaaaaatctcc

SEQ ID NO: 12478 - DNA, 20 bp, Artificial Sequence
  Chr12_7 Reverse Primer
catttgctttcttttgggga

SEQ ID NO: 12479 - DNA, 20 bp, Artificial Sequence
  Chr12_7 Reverse Primer
ggaaaaagcattgggaatga

SEQ ID NO: 12480 - DNA, 20 bp, Artificial Sequence
  Chr12_7 Reverse Primer
tgctcattgcacagttcaca

SEQ ID NO: 12481 - DNA, 21 bp, Artificial Sequence
  Chr12_7 Reverse Primer
tttgtgccatttcttgtaggc

SEQ ID NO: 12482 - DNA, 20 bp, Artificial Sequence
  Chr12_7 Reverse Primer
ccaagtgctctttccctctg

SEQ ID NO: 12483 - DNA, 20 bp, Artificial Sequence
  Chr12_7 Reverse Primer
gagggaaggaaccacatgaa

SEQ ID NO: 12484 - DNA, 20 bp, Artificial Sequence
  Chr12_7 Reverse Primer
ggacaggctctttacctccc

SEQ ID NO: 12485 - DNA, 21 bp, Artificial Sequence
  Chr12_7 Reverse Primer
gccttgatgtcttttaccacc

SEQ ID NO: 12486 - DNA, 20 bp, Artificial Sequence
  Chr12_7 Reverse Primer
tttctggctcagcctctcat

SEQ ID NO: 12487 - DNA, 20 bp, Artificial Sequence
  Chr12_7 Reverse Primer
gaaaggctggaactggaggt

SEQ ID NO: 12488 - DNA, 20 bp, Artificial Sequence
  Chr12_7 Reverse Primer
ctatgggaggaggcaggaag

SEQ ID NO: 12489 - DNA, 20 bp, Artificial Sequence
  Chr12_7 Reverse Primer
ccttgtcgaagtcccacagt

SEQ ID NO: 12490 - DNA, 20 bp, Artificial Sequence
  Chr12_7 Reverse Primer
ctgctgctctttaacccagg

SEQ ID NO: 12491 - DNA, 20 bp, Artificial Sequence
  Chr12_7 Reverse Primer
ccattggcacttccgtatct

SEQ ID NO: 12492 - DNA, 20 bp, Artificial Sequence
  Chr12_7 Reverse Primer
gtgggtacagcacacagtgg

SEQ ID NO: 12493 - DNA, 27 bp, Artificial Sequence
  Chr12_7 Reverse Primer
aaatcttaaaatgaatgaagtgtcaaa

SEQ ID NO: 12494 - DNA, 20 bp, Artificial Sequence
  Chr12_7 Reverse Primer
ttttgaaggacagcaaggct

SEQ ID NO: 12495 - DNA, 20 bp, Artificial Sequence
  Chr12_7 Reverse Primer
ggcactgtaaggcaacctgt

SEQ ID NO: 12496 - DNA, 20 bp, Artificial Sequence
  Chr12_7 Reverse Primer
ccaatctcagctttgcttcc

SEQ ID NO: 12497 - DNA, 22 bp, Artificial Sequence
  Chr12_8 Forward Primer
tgttgagagttcttttgcagga

SEQ ID NO: 12498 - DNA, 25 bp, Artificial Sequence
  Chr12_8 Forward Primer
ttgccttaaggatatagactggatg

SEQ ID NO: 12499 - DNA, 20 bp, Artificial Sequence
  Chr12_8 Forward Primer
atccattgctaatgctgctg

SEQ ID NO: 12500 - DNA, 24 bp, Artificial Sequence
  Chr12_8 Forward Primer
caaacagaaaggaaaaacttctgg

SEQ ID NO: 12501 - DNA, 20 bp, Artificial Sequence
  Chr12_8 Forward Primer
gcccaataccactcatttgg

SEQ ID NO: 12502 - DNA, 20 bp, Artificial Sequence
  Chr12_8 Forward Primer
agttgccaagctcactccac

SEQ ID NO: 12503 - DNA, 20 bp, Artificial Sequence
  Chr12_8 Forward Primer
acgctttttgtggaatgagg

SEQ ID NO: 12504 - DNA, 20 bp, Artificial Sequence
  Chr12_8 Forward Primer
cgtccagtgttgtgtgtgaa

SEQ ID NO: 12505 - DNA, 20 bp, Artificial Sequence
  Chr12_8 Forward Primer
atgtacatagggaagcccca

SEQ ID NO: 12506 - DNA, 20 bp, Artificial Sequence
  Chr12_8 Forward Primer
tgccatcgttttctgtcaaa

SEQ ID NO: 12507 - DNA, 20 bp, Artificial Sequence
  Chr12_8 Forward Primer
tagccattttcatggctgtg

SEQ ID NO: 12508 - DNA, 23 bp, Artificial Sequence
  Chr12_8 Forward Primer
aaatttttcagcacttcattcaa

SEQ ID NO: 12509 - DNA, 21 bp, Artificial Sequence
  Chr12_8 Forward Primer
tccagatttgagtttgaaggg

SEQ ID NO: 12510 - DNA, 20 bp, Artificial Sequence
  Chr12_8 Forward Primer
atcaggctttaccggttttt

SEQ ID NO: 12511 - DNA, 26 bp, Artificial Sequence
  Chr12_8 Forward Primer
cacattgagtattaaacatttccagg

SEQ ID NO: 12512 - DNA, 22 bp, Artificial Sequence
  Chr12_8 Forward Primer
tttgttgttattttgggaacca

SEQ ID NO: 12513 - DNA, 24 bp, Artificial Sequence
  Chr12_8 Forward Primer
tgtgtgcatctcaatcagtaaaaa

SEQ ID NO: 12514 - DNA, 27 bp, Artificial Sequence
  Chr12_8 Forward Primer
gagatcatagctgaattatcatttgac

SEQ ID NO: 12515 - DNA, 20 bp, Artificial Sequence
  Chr12_8 Forward Primer
tccttgctacagacgggaag

SEQ ID NO: 12516 - DNA, 23 bp, Artificial Sequence
  Chr12_8 Forward Primer
aaatggtttcagcatactatcgg

SEQ ID NO: 12517 - DNA, 21 bp, Artificial Sequence
  Chr12_8 Forward Primer
ccactggccccactagtagat

SEQ ID NO: 12518 - DNA, 21 bp, Artificial Sequence
  Chr12_8 Forward Primer
tggaggcagagttgttatcag

SEQ ID NO: 12519 - DNA, 21 bp, Artificial Sequence
  Chr12_8 Forward Primer
tgcattctggtttaccattca

SEQ ID NO: 12520 - DNA, 20 bp, Artificial Sequence
  Chr12_8 Forward Primer
tgtctttgcatgtggaggag

SEQ ID NO: 12521 - DNA, 21 bp, Artificial Sequence
  Chr12_8 Forward Primer
tgttcccacctttacatagcg

SEQ ID NO: 12522 - DNA, 21 bp, Artificial Sequence
  Chr12_8 Forward Primer
cgaaaacagattagggctgaa

SEQ ID NO: 12523 - DNA, 26 bp, Artificial Sequence
  Chr12_8 Forward Primer
tgtcatataaaagcacttttcctttc

SEQ ID NO: 12524 - DNA, 27 bp, Artificial Sequence
  Chr12_8 Forward Primer
gaaaatttgtcttctgtattttaagca

SEQ ID NO: 12525 - DNA, 22 bp, Artificial Sequence
  Chr12_8 Forward Primer
aacaggttttctgcattcaaca

SEQ ID NO: 12526 - DNA, 20 bp, Artificial Sequence
  Chr12_8 Forward Primer
agcttacggattctggctca

SEQ ID NO: 12527 - DNA, 20 bp, Artificial Sequence
  Chr12_8 Forward Primer
cttggcattctccaccaaat

SEQ ID NO: 12528 - DNA, 20 bp, Artificial Sequence
  Chr12_8 Forward Primer
ttgcctgacattggagatca

SEQ ID NO: 12529 - DNA, 22 bp, Artificial Sequence
  Chr12_8 Forward Primer
tggatacattgaaactgcttgg

SEQ ID NO: 12530 - DNA, 20 bp, Artificial Sequence
  Chr12_8 Forward Primer
tcattctccatccttcaccc

SEQ ID NO: 12531 - DNA, 20 bp, Artificial Sequence
  Chr12_8 Forward Primer
actccaggcagtttcagcat

SEQ ID NO: 12532 - DNA, 20 bp, Artificial Sequence
  Chr12_8 Forward Primer
ttcagatggaagaggaggga

SEQ ID NO: 12533 - DNA, 24 bp, Artificial Sequence
  Chr12_8 Forward Primer
ttggttcaatagaaagtgacatga

SEQ ID NO: 12534 - DNA, 21 bp, Artificial Sequence
  Chr12_8 Forward Primer
ggtccccatgtgttaagtttc

SEQ ID NO: 12535 - DNA, 20 bp, Artificial Sequence
  Chr12_8 Forward Primer
gtgagaatttggggatctcg

SEQ ID NO: 12536 - DNA, 20 bp, Artificial Sequence
  Chr12_8 Forward Primer
ggggacaacttctctgtgct

SEQ ID NO: 12537 - DNA, 20 bp, Artificial Sequence
  Chr12_8 Forward Primer
ctggagtgcagtggtgtgat

SEQ ID NO: 12538 - DNA, 23 bp, Artificial Sequence
  Chr12_8 Forward Primer
ttgatcattttaaagcactgcaa

SEQ ID NO: 12539 - DNA, 20 bp, Artificial Sequence
  Chr12_8 Forward Primer
taaagctgccaaaaggttgc

SEQ ID NO: 12540 - DNA, 22 bp, Artificial Sequence
  Chr12_8 Forward Primer
tgatgccatttatggatttcaa

SEQ ID NO: 12541 - DNA, 23 bp, Artificial Sequence
  Chr12_8 Forward Primer
gaccttgaggatctctcctcttt

SEQ ID NO: 12542 - DNA, 22 bp, Artificial Sequence
  Chr12_8 Forward Primer
ctgtggagacagtttcaaaagc

SEQ ID NO: 12543 - DNA, 21 bp, Artificial Sequence
  Chr12_8 Forward Primer
tgaatgattccctttggtctg

SEQ ID NO: 12544 - DNA, 20 bp, Artificial Sequence
  Chr12_8 Forward Primer
gaatgttgtgtgagggcaga

SEQ ID NO: 12545 - DNA, 20 bp, Artificial Sequence
  Chr12_8 Forward Primer
gaagagctttccctgcaatg

SEQ ID NO: 12546 - DNA, 20 bp, Artificial Sequence
  Chr12_8 Forward Primer
caaggtacttgggccatttc

SEQ ID NO: 12547 - DNA, 20 bp, Artificial Sequence
  Chr12_8 Forward Primer
ggctttgcttctagcaggtg

SEQ ID NO: 12548 - DNA, 22 bp, Artificial Sequence
  Chr12_8 Forward Primer
aaatctgcttatcagcaaaagg

SEQ ID NO: 12549 - DNA, 20 bp, Artificial Sequence
  Chr12_8 Forward Primer
cctacaaaagggcgttttca

SEQ ID NO: 12550 - DNA, 24 bp, Artificial Sequence
  Chr12_8 Forward Primer
aaaaatggatttatctaagcttgc

SEQ ID NO: 12551 - DNA, 20 bp, Artificial Sequence
  Chr12_8 Forward Primer
cattagcatgccatcgaaaa

SEQ ID NO: 12552 - DNA, 20 bp, Artificial Sequence
  Chr12_8 Forward Primer
tcctgtcttctccctgccta

SEQ ID NO: 12553 - DNA, 20 bp, Artificial Sequence
  Chr12_8 Forward Primer
cagaaacatgtgggcctgta

SEQ ID NO: 12554 - DNA, 20 bp, Artificial Sequence
  Chr12_8 Forward Primer
gtgatgcaaatgattcctgc

SEQ ID NO: 12555 - DNA, 20 bp, Artificial Sequence
  Chr12_8 Forward Primer
acctgccctcccttcttcta

SEQ ID NO: 12556 - DNA, 25 bp, Artificial Sequence
  Chr12_8 Forward Primer
cagataaatatgtaacatggccttt

SEQ ID NO: 12557 - DNA, 20 bp, Artificial Sequence
  Chr12_8 Forward Primer
gtacaaaagccccagagcag

SEQ ID NO: 12558 - DNA, 20 bp, Artificial Sequence
  Chr12_8 Forward Primer
acaaatgcagccttttgctc

SEQ ID NO: 12559 - DNA, 20 bp, Artificial Sequence
  Chr12_8 Forward Primer
gaggaaagattgaaacccca

SEQ ID NO: 12560 - DNA, 21 bp, Artificial Sequence
  Chr12_8 Forward Primer
tggcccttggtattagacaga

SEQ ID NO: 12561 - DNA, 20 bp, Artificial Sequence
  Chr12_8 Forward Primer
ttattctgggggttgactgg

SEQ ID NO: 12562 - DNA, 21 bp, Artificial Sequence
  Chr12_8 Forward Primer
cacagtgtcaccgctattgaa

SEQ ID NO: 12563 - DNA, 24 bp, Artificial Sequence
  Chr12_8 Forward Primer
taaagtaacttggcttttcttgcc

SEQ ID NO: 12564 - DNA, 20 bp, Artificial Sequence
  Chr12_8 Forward Primer
tgtaaagcatgcatggagga

SEQ ID NO: 12565 - DNA, 20 bp, Artificial Sequence
  Chr12_8 Forward Primer
tttcaaagaaagtgcagggg

SEQ ID NO: 12566 - DNA, 20 bp, Artificial Sequence
  Chr12_8 Forward Primer
acagggaactcctctgctcc

SEQ ID NO: 12567 - DNA, 21 bp, Artificial Sequence
  Chr12_8 Forward Primer
aggagagtcttgccttgttcc

SEQ ID NO: 12568 - DNA, 20 bp, Artificial Sequence
  Chr12_8 Forward Primer
aatcactgcaattgtttgcg

SEQ ID NO: 12569 - DNA, 22 bp, Artificial Sequence
  Chr12_8 Forward Primer
ttggttctctaggggcttaaaa

SEQ ID NO: 12570 - DNA, 20 bp, Artificial Sequence
  Chr12_8 Forward Primer
atctgtgctttcctagccga

SEQ ID NO: 12571 - DNA, 20 bp, Artificial Sequence
  Chr12_8 Forward Primer
agtggcaatgattttcccag

SEQ ID NO: 12572 - DNA, 25 bp, Artificial Sequence
  Chr12_8 Forward Primer
ggattttgatttttcaattttaacg

SEQ ID NO: 12573 - DNA, 20 bp, Artificial Sequence
  Chr12_8 Forward Primer
cggtgggcttcttatcacag

SEQ ID NO: 12574 - DNA, 20 bp, Artificial Sequence
  Chr12_8 Forward Primer
ggttcttgcctttgcagaaa

SEQ ID NO: 12575 - DNA, 20 bp, Artificial Sequence
  Chr12_8 Forward Primer
aagcaaatggcagaagatgg

SEQ ID NO: 12576 - DNA, 20 bp, Artificial Sequence
  Chr12_8 Forward Primer
cagtggaggtggaacaaagg

SEQ ID NO: 12577 - DNA, 21 bp, Artificial Sequence
  Chr12_8 Forward Primer
gaaaagtgagtcccagaaggg

SEQ ID NO: 12578 - DNA, 20 bp, Artificial Sequence
  Chr12_8 Forward Primer
attgggagccattttctggt

SEQ ID NO: 12579 - DNA, 20 bp, Artificial Sequence
  Chr12_8 Forward Primer
aaggaatggtgggaaatgtg

SEQ ID NO: 12580 - DNA, 20 bp, Artificial Sequence
  Chr12_8 Forward Primer
cctcaaaagatgtctgcacg

SEQ ID NO: 12581 - DNA, 20 bp, Artificial Sequence
  Chr12_8 Forward Primer
tgctggtgcaaagatgagag

SEQ ID NO: 12582 - DNA, 20 bp, Artificial Sequence
  Chr12_8 Forward Primer
aacttctgccccacagagaa

SEQ ID NO: 12583 - DNA, 20 bp, Artificial Sequence
  Chr12_8 Forward Primer
gtggccagtttttctcctga

SEQ ID NO: 12584 - DNA, 20 bp, Artificial Sequence
  Chr12_8 Forward Primer
atcccaccccagtgtctgta

SEQ ID NO: 12585 - DNA, 20 bp, Artificial Sequence
  Chr12_8 Forward Primer
attccaattgtttcatgccc

SEQ ID NO: 12586 - DNA, 21 bp, Artificial Sequence
  Chr12_8 Forward Primer
ccctgaacattacccatctga

SEQ ID NO: 12587 - DNA, 20 bp, Artificial Sequence
  Chr12_8 Forward Primer
catcattttgggcaattcct

SEQ ID NO: 12588 - DNA, 20 bp, Artificial Sequence
  Chr12_8 Forward Primer
gattctcagctctgggcttg

SEQ ID NO: 12589 - DNA, 24 bp, Artificial Sequence
  Chr12_8 Forward Primer
ccacactttagtaatcccatccat

SEQ ID NO: 12590 - DNA, 20 bp, Artificial Sequence
  Chr12_8 Forward Primer
cagaaattccctttccacca

SEQ ID NO: 12591 - DNA, 20 bp, Artificial Sequence
  Chr12_8 Forward Primer
agatggctgcagtgaacaca

SEQ ID NO: 12592 - DNA, 23 bp, Artificial Sequence
  Chr12_8 Forward Primer
gcacatttgtgtgtgtatgtgtg

SEQ ID NO: 12593 - DNA, 22 bp, Artificial Sequence
  Chr12_8 Reverse Primer
ggcagtcactgaatacaccaga

SEQ ID NO: 12594 - DNA, 20 bp, Artificial Sequence
  Chr12_8 Reverse Primer
gaagaagcaaagggattgga

SEQ ID NO: 12595 - DNA, 20 bp, Artificial Sequence
  Chr12_8 Reverse Primer
tatcaagattggctcagggg

SEQ ID NO: 12596 - DNA, 20 bp, Artificial Sequence
  Chr12_8 Reverse Primer
aatgacatggcaatcacctg

SEQ ID NO: 12597 - DNA, 22 bp, Artificial Sequence
  Chr12_8 Reverse Primer
ccaaattcagcttcatgtttca

SEQ ID NO: 12598 - DNA, 20 bp, Artificial Sequence
  Chr12_8 Reverse Primer
gaaagaagcagcagctaccc

SEQ ID NO: 12599 - DNA, 21 bp, Artificial Sequence
  Chr12_8 Reverse Primer
gctgaagcaatcatggctagt

SEQ ID NO: 12600 - DNA, 20 bp, Artificial Sequence
  Chr12_8 Reverse Primer
tcattgccagacaatccaag

SEQ ID NO: 12601 - DNA, 23 bp, Artificial Sequence
  Chr12_8 Reverse Primer
gcagaatagaccactgttcaaga

SEQ ID NO: 12602 - DNA, 20 bp, Artificial Sequence
  Chr12_8 Reverse Primer
acccacttgaggtatgctcg

SEQ ID NO: 12603 - DNA, 20 bp, Artificial Sequence
  Chr12_8 Reverse Primer
tggtggagtgaaaaacctca

SEQ ID NO: 12604 - DNA, 21 bp, Artificial Sequence
  Chr12_8 Reverse Primer
cctccatcgcagtgtgatatt

SEQ ID NO: 12605 - DNA, 21 bp, Artificial Sequence
  Chr12_8 Reverse Primer
caccatcttaatgccattggt

SEQ ID NO: 12606 - DNA, 20 bp, Artificial Sequence
  Chr12_8 Reverse Primer
attgctatggctggaggttg

SEQ ID NO: 12607 - DNA, 22 bp, Artificial Sequence
  Chr12_8 Reverse Primer
aatgcaagtttatgacccaact

SEQ ID NO: 12608 - DNA, 22 bp, Artificial Sequence
  Chr12_8 Reverse Primer
tcctgcaaattagaaatgcaaa

SEQ ID NO: 12609 - DNA, 23 bp, Artificial Sequence
  Chr12_8 Reverse Primer
gcaagctattttaggttctccaa

SEQ ID NO: 12610 - DNA, 20 bp, Artificial Sequence
  Chr12_8 Reverse Primer
ccctcattcccttggttcat

SEQ ID NO: 12611 - DNA, 23 bp, Artificial Sequence
  Chr12_8 Reverse Primer
ttccatcccaatttatattccaa

SEQ ID NO: 12612 - DNA, 22 bp, Artificial Sequence
  Chr12_8 Reverse Primer
ttcaaagcaattgaacaaaagg

SEQ ID NO: 12613 - DNA, 25 bp, Artificial Sequence
  Chr12_8 Reverse Primer
cagcacaaacatttaattcaaaaca

SEQ ID NO: 12614 - DNA, 20 bp, Artificial Sequence
  Chr12_8 Reverse Primer
ttcgaaagagccagtgacaa

SEQ ID NO: 12615 - DNA, 21 bp, Artificial Sequence
  Chr12_8 Reverse Primer
tgtggtccactcgtaaaacct

SEQ ID NO: 12616 - DNA, 20 bp, Artificial Sequence
  Chr12_8 Reverse Primer
tctgcagaggcaagtcaaag

SEQ ID NO: 12617 - DNA, 22 bp, Artificial Sequence
  Chr12_8 Reverse Primer
gcattcaaaaggataatgtgga

SEQ ID NO: 12618 - DNA, 20 bp, Artificial Sequence
  Chr12_8 Reverse Primer
tggggaatggatttaggaaa

SEQ ID NO: 12619 - DNA, 24 bp, Artificial Sequence
  Chr12_8 Reverse Primer
tgcttggtcagaaaagactaaaaa

SEQ ID NO: 12620 - DNA, 20 bp, Artificial Sequence
  Chr12_8 Reverse Primer
ttttccatttgcatggacct

SEQ ID NO: 12621 - DNA, 20 bp, Artificial Sequence
  Chr12_8 Reverse Primer
agctaaaatgagtggctccg

SEQ ID NO: 12622 - DNA, 20 bp, Artificial Sequence
  Chr12_8 Reverse Primer
gttggtttgaagtgaagccc

SEQ ID NO: 12623 - DNA, 20 bp, Artificial Sequence
  Chr12_8 Reverse Primer
aagataaagcgggtgacagc

SEQ ID NO: 12624 - DNA, 20 bp, Artificial Sequence
  Chr12_8 Reverse Primer
gctgaaaaggctcaatgctc

SEQ ID NO: 12625 - DNA, 20 bp, Artificial Sequence
  Chr12_8 Reverse Primer
accagcctgctaaaatgctc

SEQ ID NO: 12626 - DNA, 20 bp, Artificial Sequence
  Chr12_8 Reverse Primer
agcaggcagttgttggagtt

SEQ ID NO: 12627 - DNA, 20 bp, Artificial Sequence
  Chr12_8 Reverse Primer
aacactagccagcttttgcg

SEQ ID NO: 12628 - DNA, 20 bp, Artificial Sequence
  Chr12_8 Reverse Primer
ttctcctccaactcaccagg

SEQ ID NO: 12629 - DNA, 21 bp, Artificial Sequence
  Chr12_8 Reverse Primer
ggcagaacaaagagatgttca

SEQ ID NO: 12630 - DNA, 21 bp, Artificial Sequence
  Chr12_8 Reverse Primer
gctttatctttgcagtgtggc

SEQ ID NO: 12631 - DNA, 22 bp, Artificial Sequence
  Chr12_8 Reverse Primer
gcctaaccactggatctacaca

SEQ ID NO: 12632 - DNA, 20 bp, Artificial Sequence
  Chr12_8 Reverse Primer
cccttccctccttcaaaaag

SEQ ID NO: 12633 - DNA, 23 bp, Artificial Sequence
  Chr12_8 Reverse Primer
tgatgtttctgtcaaaaatggaa

SEQ ID NO: 12634 - DNA, 20 bp, Artificial Sequence
  Chr12_8 Reverse Primer
tatcattggcaaaggttccg

SEQ ID NO: 12635 - DNA, 20 bp, Artificial Sequence
  Chr12_8 Reverse Primer
agcacacgtgcaaaatcaaa

SEQ ID NO: 12636 - DNA, 22 bp, Artificial Sequence
  Chr12_8 Reverse Primer
tgagcacacagtaggtcaacaa

SEQ ID NO: 12637 - DNA, 21 bp, Artificial Sequence
  Chr12_8 Reverse Primer
tgtttatttgctttcctgcca

SEQ ID NO: 12638 - DNA, 22 bp, Artificial Sequence
  Chr12_8 Reverse Primer
ggctgtaggaagtttgaactgg

SEQ ID NO: 12639 - DNA, 20 bp, Artificial Sequence
  Chr12_8 Reverse Primer
aaagagcccatatccagcct

SEQ ID NO: 12640 - DNA, 20 bp, Artificial Sequence
  Chr12_8 Reverse Primer
cctgcagctggtgaacagta

SEQ ID NO: 12641 - DNA, 18 bp, Artificial Sequence
  Chr12_8 Reverse Primer
ggggagggtgttggaatc

SEQ ID NO: 12642 - DNA, 20 bp, Artificial Sequence
  Chr12_8 Reverse Primer
tacattggttttccagggga

SEQ ID NO: 12643 - DNA, 20 bp, Artificial Sequence
  Chr12_8 Reverse Primer
tctgggaccaaattctgtga

SEQ ID NO: 12644 - DNA, 23 bp, Artificial Sequence
  Chr12_8 Reverse Primer
cacattctaaaaatgcacatcca

SEQ ID NO: 12645 - DNA, 20 bp, Artificial Sequence
  Chr12_8 Reverse Primer
gcaaagcttgtttgaagtgc

SEQ ID NO: 12646 - DNA, 21 bp, Artificial Sequence
  Chr12_8 Reverse Primer
tttgagaaaggcatacatcca

SEQ ID NO: 12647 - DNA, 21 bp, Artificial Sequence
  Chr12_8 Reverse Primer
ttgcaaatgatccagaagagg

SEQ ID NO: 12648 - DNA, 20 bp, Artificial Sequence
  Chr12_8 Reverse Primer
tttggttggatgaaggggta

SEQ ID NO: 12649 - DNA, 24 bp, Artificial Sequence
  Chr12_8 Reverse Primer
cctagaaaggtgaaaactacacca

SEQ ID NO: 12650 - DNA, 20 bp, Artificial Sequence
  Chr12_8 Reverse Primer
aggcaaagaaggcaatagga

SEQ ID NO: 12651 - DNA, 20 bp, Artificial Sequence
  Chr12_8 Reverse Primer
atatcagcattcctggtggc

SEQ ID NO: 12652 - DNA, 22 bp, Artificial Sequence
  Chr12_8 Reverse Primer
ccccttaactctcatagcctca

SEQ ID NO: 12653 - DNA, 20 bp, Artificial Sequence
  Chr12_8 Reverse Primer
tgcttctgcccaaactcttt

SEQ ID NO: 12654 - DNA, 20 bp, Artificial Sequence
  Chr12_8 Reverse Primer
gcaggagtcttgggaggatt

SEQ ID NO: 12655 - DNA, 20 bp, Artificial Sequence
  Chr12_8 Reverse Primer
caaaaacaacaaaggcagga

SEQ ID NO: 12656 - DNA, 25 bp, Artificial Sequence
  Chr12_8 Reverse Primer
gactgtaaattttagggtgatttgg

SEQ ID NO: 12657 - DNA, 20 bp, Artificial Sequence
  Chr12_8 Reverse Primer
caagtatgaggaaggccagg

SEQ ID NO: 12658 - DNA, 20 bp, Artificial Sequence
  Chr12_8 Reverse Primer
ctgcagcccctattaactcg

SEQ ID NO: 12659 - DNA, 20 bp, Artificial Sequence
  Chr12_8 Reverse Primer
tcttcaaaattctgccagcc

SEQ ID NO: 12660 - DNA, 20 bp, Artificial Sequence
  Chr12_8 Reverse Primer
gaataatgttgcccccttga

SEQ ID NO: 12661 - DNA, 20 bp, Artificial Sequence
  Chr12_8 Reverse Primer
tctaaccgagtggctggact

SEQ ID NO: 12662 - DNA, 22 bp, Artificial Sequence
  Chr12_8 Reverse Primer
tgagtctggggaattttagagc

SEQ ID NO: 12663 - DNA, 20 bp, Artificial Sequence
  Chr12_8 Reverse Primer
aggtagggcctctttcctca

SEQ ID NO: 12664 - DNA, 23 bp, Artificial Sequence
  Chr12_8 Reverse Primer
ggaagaggaatatttccttagca

SEQ ID NO: 12665 - DNA, 20 bp, Artificial Sequence
  Chr12_8 Reverse Primer
tgggaagaaaacttgaaccc

SEQ ID NO: 12666 - DNA, 20 bp, Artificial Sequence
  Chr12_8 Reverse Primer
catgtccccaagtcagtggt

SEQ ID NO: 12667 - DNA, 20 bp, Artificial Sequence
  Chr12_8 Reverse Primer
tagaatggcagggatatggg

SEQ ID NO: 12668 - DNA, 20 bp, Artificial Sequence
  Chr12_8 Reverse Primer
ggttctgcacacaatgcaag

SEQ ID NO: 12669 - DNA, 20 bp, Artificial Sequence
  Chr12_8 Reverse Primer
tgccatgtcttttctttcca

SEQ ID NO: 12670 - DNA, 20 bp, Artificial Sequence
  Chr12_8 Reverse Primer
ccaaataccctactgcctgg

SEQ ID NO: 12671 - DNA, 20 bp, Artificial Sequence
  Chr12_8 Reverse Primer
tcagagcctccacccttatc

SEQ ID NO: 12672 - DNA, 20 bp, Artificial Sequence
  Chr12_8 Reverse Primer
tttatgtctgccaggtgctg

SEQ ID NO: 12673 - DNA, 20 bp, Artificial Sequence
  Chr12_8 Reverse Primer
atacggtctctgtgcttgcc

SEQ ID NO: 12674 - DNA, 21 bp, Artificial Sequence
  Chr12_8 Reverse Primer
tctggaagcctctatgtttgc

SEQ ID NO: 12675 - DNA, 20 bp, Artificial Sequence
  Chr12_8 Reverse Primer
actctggtttcacctgtggg

SEQ ID NO: 12676 - DNA, 21 bp, Artificial Sequence
  Chr12_8 Reverse Primer
ctgaatctctctgcctttccc

SEQ ID NO: 12677 - DNA, 20 bp, Artificial Sequence
  Chr12_8 Reverse Primer
ttcgacatggaggaaatcaa

SEQ ID NO: 12678 - DNA, 20 bp, Artificial Sequence
  Chr12_8 Reverse Primer
ctctcccttttcccacttcc

SEQ ID NO: 12679 - DNA, 24 bp, Artificial Sequence
  Chr12_8 Reverse Primer
aaaggacttaaatttcaatgccac

SEQ ID NO: 12680 - DNA, 20 bp, Artificial Sequence
  Chr12_8 Reverse Primer
cagacctctcagcttcctgg

SEQ ID NO: 12681 - DNA, 22 bp, Artificial Sequence
  Chr12_8 Reverse Primer
tgggatttcattatttgctttc

SEQ ID NO: 12682 - DNA, 20 bp, Artificial Sequence
  Chr12_8 Reverse Primer
agcctgtcctcagtcaagca

SEQ ID NO: 12683 - DNA, 20 bp, Artificial Sequence
  Chr12_8 Reverse Primer
gccaaagaagcaaacaaagc

SEQ ID NO: 12684 - DNA, 20 bp, Artificial Sequence
  Chr12_8 Reverse Primer
tgaggtcctatggccattta

SEQ ID NO: 12685 - DNA, 26 bp, Artificial Sequence
  Chr12_8 Reverse Primer
gcattatttaatgagactctaacagc

SEQ ID NO: 12686 - DNA, 20 bp, Artificial Sequence
  Chr12_8 Reverse Primer
tctcacattccccatcagtg

SEQ ID NO: 12687 - DNA, 20 bp, Artificial Sequence
  Chr12_8 Reverse Primer
ttgctggtcaagagtttgga

SEQ ID NO: 12688 - DNA, 27 bp, Artificial Sequence
  Chr12_8 Reverse Primer
aaacttaatctttaccaatgctttgaa

SEQ ID NO: 12689 - DNA, 20 bp, Artificial Sequence
  Chr12_9 Forward Primer
ctgttacacccccagcatct

SEQ ID NO: 12690 - DNA, 20 bp, Artificial Sequence
  Chr12_9 Forward Primer
tcaattgtgtgcatctggtg

SEQ ID NO: 12691 - DNA, 21 bp, Artificial Sequence
  Chr12_9 Forward Primer
aaatgcagaaaaaggatgcaa

SEQ ID NO: 12692 - DNA, 20 bp, Artificial Sequence
  Chr12_9 Forward Primer
ggggcaaaatgcagttctta

SEQ ID NO: 12693 - DNA, 20 bp, Artificial Sequence
  Chr12_9 Forward Primer
ctggtcactgggctttcaat

SEQ ID NO: 12694 - DNA, 20 bp, Artificial Sequence
  Chr12_9 Forward Primer
gccttttctctctggcagtt

SEQ ID NO: 12695 - DNA, 20 bp, Artificial Sequence
  Chr12_9 Forward Primer
actggagcacggaaagaatg

SEQ ID NO: 12696 - DNA, 21 bp, Artificial Sequence
  Chr12_9 Forward Primer
cacaaaaataacccctccacc

SEQ ID NO: 12697 - DNA, 20 bp, Artificial Sequence
  Chr12_9 Forward Primer
tggaacttatgcctgctcct

SEQ ID NO: 12698 - DNA, 20 bp, Artificial Sequence
  Chr12_9 Forward Primer
gggtgtttagttgatgggca

SEQ ID NO: 12699 - DNA, 20 bp, Artificial Sequence
  Chr12_9 Forward Primer
aggttcatgtggttgccaat

SEQ ID NO: 12700 - DNA, 20 bp, Artificial Sequence
  Chr12_9 Forward Primer
gaaggaaaacctaccccagc

SEQ ID NO: 12701 - DNA, 20 bp, Artificial Sequence
  Chr12_9 Forward Primer
aagcctgtcaaagctaggca

SEQ ID NO: 12702 - DNA, 20 bp, Artificial Sequence
  Chr12_9 Forward Primer
tgggtccaacatattggtga

SEQ ID NO: 12703 - DNA, 20 bp, Artificial Sequence
  Chr12_9 Forward Primer
ccatggatcagctgtgtctg

SEQ ID NO: 12704 - DNA, 21 bp, Artificial Sequence
  Chr12_9 Forward Primer
aatcaaggagccacgtagtca

SEQ ID NO: 12705 - DNA, 20 bp, Artificial Sequence
  Chr12_9 Forward Primer
acatgagtgtgtgctctgcc

SEQ ID NO: 12706 - DNA, 20 bp, Artificial Sequence
  Chr12_9 Forward Primer
tcattgacagcacctcctca

SEQ ID NO: 12707 - DNA, 19 bp, Artificial Sequence
  Chr12_9 Forward Primer
gtgcataatggcgtcatcc

SEQ ID NO: 12708 - DNA, 20 bp, Artificial Sequence
  Chr12_9 Forward Primer
ctcccaaaagctgttccctc

SEQ ID NO: 12709 - DNA, 22 bp, Artificial Sequence
  Chr12_9 Forward Primer
tttcgattttgtcatttttgaa

SEQ ID NO: 12710 - DNA, 20 bp, Artificial Sequence
  Chr12_9 Forward Primer
aaacgaggtctacacgtggg

SEQ ID NO: 12711 - DNA, 20 bp, Artificial Sequence
  Chr12_9 Forward Primer
gccaccaaccctgagactaa

SEQ ID NO: 12712 - DNA, 20 bp, Artificial Sequence
  Chr12_9 Forward Primer
ggtgactagtgctgtccacg

SEQ ID NO: 12713 - DNA, 26 bp, Artificial Sequence
  Chr12_9 Forward Primer
ttgtacaaagaaactcagagaacaga

SEQ ID NO: 12714 - DNA, 20 bp, Artificial Sequence
  Chr12_9 Forward Primer
ggttcccatttgtgctcagt

SEQ ID NO: 12715 - DNA, 20 bp, Artificial Sequence
  Chr12_9 Forward Primer
cacagtgcggtggaagtcta

SEQ ID NO: 12716 - DNA, 20 bp, Artificial Sequence
  Chr12_9 Forward Primer
tgagggagcgtagaggagaa

SEQ ID NO: 12717 - DNA, 20 bp, Artificial Sequence
  Chr12_9 Forward Primer
tggtacctacctccctgtgc

SEQ ID NO: 12718 - DNA, 20 bp, Artificial Sequence
  Chr12_9 Forward Primer
tttgtttcctgatggtgcaa

SEQ ID NO: 12719 - DNA, 20 bp, Artificial Sequence
  Chr12_9 Forward Primer
acaagatctgtttccgtggc

SEQ ID NO: 12720 - DNA, 20 bp, Artificial Sequence
  Chr12_9 Forward Primer
ttatgagtcccccagcagag

SEQ ID NO: 12721 - DNA, 20 bp, Artificial Sequence
  Chr12_9 Forward Primer
ccttggcacactttccaaat

SEQ ID NO: 12722 - DNA, 20 bp, Artificial Sequence
  Chr12_9 Forward Primer
agggtaggtcggggctacta

SEQ ID NO: 12723 - DNA, 20 bp, Artificial Sequence
  Chr12_9 Forward Primer
ttcaggaattggctgcttct

SEQ ID NO: 12724 - DNA, 20 bp, Artificial Sequence
  Chr12_9 Forward Primer
acctgctcccttcctctctc

SEQ ID NO: 12725 - DNA, 20 bp, Artificial Sequence
  Chr12_9 Forward Primer
gctaaatgaaggcttggctg

SEQ ID NO: 12726 - DNA, 22 bp, Artificial Sequence
  Chr12_9 Forward Primer
tggaggtaactgtccaggtttt

SEQ ID NO: 12727 - DNA, 20 bp, Artificial Sequence
  Chr12_9 Forward Primer
ccaaagatcgcccaaatagt

SEQ ID NO: 12728 - DNA, 20 bp, Artificial Sequence
  Chr12_9 Forward Primer
atgtgctactgtggatggca

SEQ ID NO: 12729 - DNA, 20 bp, Artificial Sequence
  Chr12_9 Forward Primer
tgcagtagtgtacatcgcgg

SEQ ID NO: 12730 - DNA, 20 bp, Artificial Sequence
  Chr12_9 Forward Primer
gtccctctgaaaccacgaag

SEQ ID NO: 12731 - DNA, 20 bp, Artificial Sequence
  Chr12_9 Forward Primer
gatcgccagtgagtttgtga

SEQ ID NO: 12732 - DNA, 19 bp, Artificial Sequence
  Chr12_9 Forward Primer
ctttgggctgtcttccagc

SEQ ID NO: 12733 - DNA, 20 bp, Artificial Sequence
  Chr12_9 Forward Primer
cgagtcccactcctcaccta

SEQ ID NO: 12734 - DNA, 20 bp, Artificial Sequence
  Chr12_9 Forward Primer
ggctcgccttgtatctcaac

SEQ ID NO: 12735 - DNA, 20 bp, Artificial Sequence
  Chr12_9 Forward Primer
gtttgcagcaggttctctcc

SEQ ID NO: 12736 - DNA, 20 bp, Artificial Sequence
  Chr12_9 Forward Primer
tgggacacttttatttcccg

SEQ ID NO: 12737 - DNA, 20 bp, Artificial Sequence
  Chr12_9 Forward Primer
gacgcccctagagactgaag

SEQ ID NO: 12738 - DNA, 20 bp, Artificial Sequence
  Chr12_9 Forward Primer
ttagggataacagcacgcct

SEQ ID NO: 12739 - DNA, 20 bp, Artificial Sequence
  Chr12_9 Forward Primer
tccagcaaacccgtcttaat

SEQ ID NO: 12740 - DNA, 20 bp, Artificial Sequence
  Chr12_9 Forward Primer
tgcaacttgatgggtgactt

SEQ ID NO: 12741 - DNA, 20 bp, Artificial Sequence
  Chr12_9 Forward Primer
agttgtgctttgatggttgg

SEQ ID NO: 12742 - DNA, 26 bp, Artificial Sequence
  Chr12_9 Forward Primer
acactgatttcttagcagaactacat

SEQ ID NO: 12743 - DNA, 19 bp, Artificial Sequence
  Chr12_9 Forward Primer
gtgtgaagggggaggaaag

SEQ ID NO: 12744 - DNA, 22 bp, Artificial Sequence
  Chr12_9 Forward Primer
tgctgtggtacttctcaaggtt

SEQ ID NO: 12745 - DNA, 20 bp, Artificial Sequence
  Chr12_9 Forward Primer
tggtttcagcttcatcctcc

SEQ ID NO: 12746 - DNA, 21 bp, Artificial Sequence
  Chr12_9 Forward Primer
tctaattggtgacatgccctt

SEQ ID NO: 12747 - DNA, 23 bp, Artificial Sequence
  Chr12_9 Forward Primer
tcctagttagcttttcatttggg

SEQ ID NO: 12748 - DNA, 21 bp, Artificial Sequence
  Chr12_9 Forward Primer
tgataggaatccctcgtgaaa

SEQ ID NO: 12749 - DNA, 21 bp, Artificial Sequence
  Chr12_9 Forward Primer
cagtttccttcccagttttca

SEQ ID NO: 12750 - DNA, 20 bp, Artificial Sequence
  Chr12_9 Forward Primer
gctaatgtgcccctgttgtt

SEQ ID NO: 12751 - DNA, 21 bp, Artificial Sequence
  Chr12_9 Forward Primer
tgaaaaatctgtggctgacaa

SEQ ID NO: 12752 - DNA, 20 bp, Artificial Sequence
  Chr12_9 Forward Primer
ttgggtgaaaaaggcataat

SEQ ID NO: 12753 - DNA, 21 bp, Artificial Sequence
  Chr12_9 Forward Primer
tgctgataggttgacctctgg

SEQ ID NO: 12754 - DNA, 26 bp, Artificial Sequence
  Chr12_9 Forward Primer
tcataagttccattaatttgaaaagc

SEQ ID NO: 12755 - DNA, 21 bp, Artificial Sequence
  Chr12_9 Forward Primer
ggcagaggatatgctatttgc

SEQ ID NO: 12756 - DNA, 20 bp, Artificial Sequence
  Chr12_9 Forward Primer
cttgcggtaacggaattgat

SEQ ID NO: 12757 - DNA, 20 bp, Artificial Sequence
  Chr12_9 Forward Primer
gggaagaatggcagtccata

SEQ ID NO: 12758 - DNA, 21 bp, Artificial Sequence
  Chr12_9 Forward Primer
tccaatttgttccacaatgaa

SEQ ID NO: 12759 - DNA, 20 bp, Artificial Sequence
  Chr12_9 Forward Primer
ctggcagctgaaattagcct

SEQ ID NO: 12760 - DNA, 20 bp, Artificial Sequence
  Chr12_9 Forward Primer
ctcccaaagcaatggaaaag

SEQ ID NO: 12761 - DNA, 20 bp, Artificial Sequence
  Chr12_9 Forward Primer
ccagtgtgcagcttgaaatc

SEQ ID NO: 12762 - DNA, 20 bp, Artificial Sequence
  Chr12_9 Forward Primer
ttggttggccacttttcaat

SEQ ID NO: 12763 - DNA, 20 bp, Artificial Sequence
  Chr12_9 Forward Primer
tgttcaacaacggcatcttt

SEQ ID NO: 12764 - DNA, 20 bp, Artificial Sequence
  Chr12_9 Forward Primer
aggtgctgatgcctaaatgg

SEQ ID NO: 12765 - DNA, 20 bp, Artificial Sequence
  Chr12_9 Forward Primer
aatgcttcggcctgtatgac

SEQ ID NO: 12766 - DNA, 26 bp, Artificial Sequence
  Chr12_9 Forward Primer
cagttttagtcttggaataccactgt

SEQ ID NO: 12767 - DNA, 20 bp, Artificial Sequence
  Chr12_9 Forward Primer
cccatacaccgtttctgctt

SEQ ID NO: 12768 - DNA, 20 bp, Artificial Sequence
  Chr12_9 Forward Primer
cgaccctttttctttttgga

SEQ ID NO: 12769 - DNA, 24 bp, Artificial Sequence
  Chr12_9 Forward Primer
tttcataaaagccaatatccaaaa

SEQ ID NO: 12770 - DNA, 20 bp, Artificial Sequence
  Chr12_9 Forward Primer
ctcttcacccccatttcctt

SEQ ID NO: 12771 - DNA, 21 bp, Artificial Sequence
  Chr12_9 Forward Primer
tgccacacttacagtggaaaa

SEQ ID NO: 12772 - DNA, 20 bp, Artificial Sequence
  Chr12_9 Forward Primer
tccacatctgttctttggca

SEQ ID NO: 12773 - DNA, 20 bp, Artificial Sequence
  Chr12_9 Forward Primer
ggaggtggggaggtttattt

SEQ ID NO: 12774 - DNA, 25 bp, Artificial Sequence
  Chr12_9 Forward Primer
tgtacatcataagattggacagaaa

SEQ ID NO: 12775 - DNA, 22 bp, Artificial Sequence
  Chr12_9 Forward Primer
ctgaaactggtagaaacaggca

SEQ ID NO: 12776 - DNA, 20 bp, Artificial Sequence
  Chr12_9 Forward Primer
atgtcagaggccagaaatgg

SEQ ID NO: 12777 - DNA, 20 bp, Artificial Sequence
  Chr12_9 Forward Primer
tgcttagccgtgttagggat

SEQ ID NO: 12778 - DNA, 20 bp, Artificial Sequence
  Chr12_9 Forward Primer
ataggatggagggagggaga

SEQ ID NO: 12779 - DNA, 20 bp, Artificial Sequence
  Chr12_9 Forward Primer
gtggagggttaaggggaaag

SEQ ID NO: 12780 - DNA, 20 bp, Artificial Sequence
  Chr12_9 Forward Primer
tgagcacaattcaggaaagg

SEQ ID NO: 12781 - DNA, 20 bp, Artificial Sequence
  Chr12_9 Forward Primer
aggccttgttcctgcactta

SEQ ID NO: 12782 - DNA, 20 bp, Artificial Sequence
  Chr12_9 Forward Primer
ccgaccacagttgagaaaca

SEQ ID NO: 12783 - DNA, 20 bp, Artificial Sequence
  Chr12_9 Forward Primer
ctatctgagtgtgctggcga

SEQ ID NO: 12784 - DNA, 20 bp, Artificial Sequence
  Chr12_9 Forward Primer
ggtcagcctactggtcctga

SEQ ID NO: 12785 - DNA, 20 bp, Artificial Sequence
  Chr12_9 Reverse Primer
gatattgggaggttaggccc

SEQ ID NO: 12786 - DNA, 23 bp, Artificial Sequence
  Chr12_9 Reverse Primer
tgatgaagtccaacttaacagca

SEQ ID NO: 12787 - DNA, 21 bp, Artificial Sequence
  Chr12_9 Reverse Primer
ttctccacttccacattgagc

SEQ ID NO: 12788 - DNA, 20 bp, Artificial Sequence
  Chr12_9 Reverse Primer
aaatcagcaccacaaaagcc

SEQ ID NO: 12789 - DNA, 20 bp, Artificial Sequence
  Chr12_9 Reverse Primer
atctggccacattccaagtt

SEQ ID NO: 12790 - DNA, 22 bp, Artificial Sequence
  Chr12_9 Reverse Primer
tcctttcaccataccattaccc

SEQ ID NO: 12791 - DNA, 20 bp, Artificial Sequence
  Chr12_9 Reverse Primer
tcctcatttcttggcagctt

SEQ ID NO: 12792 - DNA, 22 bp, Artificial Sequence
  Chr12_9 Reverse Primer
tgtgaacccctgattacagatg

SEQ ID NO: 12793 - DNA, 20 bp, Artificial Sequence
  Chr12_9 Reverse Primer
tcagctttggtattttgcca

SEQ ID NO: 12794 - DNA, 25 bp, Artificial Sequence
  Chr12_9 Reverse Primer
tgtaaaaatcttgatttcaaaaacc

SEQ ID NO: 12795 - DNA, 20 bp, Artificial Sequence
  Chr12_9 Reverse Primer
tttttcagcaccttcaacca

SEQ ID NO: 12796 - DNA, 20 bp, Artificial Sequence
  Chr12_9 Reverse Primer
tcaaaccacagttccatcca

SEQ ID NO: 12797 - DNA, 20 bp, Artificial Sequence
  Chr12_9 Reverse Primer
tatgcttcctgtttcacccc

SEQ ID NO: 12798 - DNA, 20 bp, Artificial Sequence
  Chr12_9 Reverse Primer
agggccccattttgacttat

SEQ ID NO: 12799 - DNA, 19 bp, Artificial Sequence
  Chr12_9 Reverse Primer
cgcttgaaacccatgttcc

SEQ ID NO: 12800 - DNA, 21 bp, Artificial Sequence
  Chr12_9 Reverse Primer
tcagcaaaatgaattcttcca

SEQ ID NO: 12801 - DNA, 20 bp, Artificial Sequence
  Chr12_9 Reverse Primer
tcagtcacacaggcaggaaa

SEQ ID NO: 12802 - DNA, 20 bp, Artificial Sequence
  Chr12_9 Reverse Primer
atggctagtcatccctggaa

SEQ ID NO: 12803 - DNA, 22 bp, Artificial Sequence
  Chr12_9 Reverse Primer
tgcataaacaaaaatgaaggca

SEQ ID NO: 12804 - DNA, 20 bp, Artificial Sequence
  Chr12_9 Reverse Primer
actgtgcaatgaccaaacga

SEQ ID NO: 12805 - DNA, 25 bp, Artificial Sequence
  Chr12_9 Reverse Primer
tctccttaacagtctctcttagcca

SEQ ID NO: 12806 - DNA, 20 bp, Artificial Sequence
  Chr12_9 Reverse Primer
agttgcaattcaagggatcg

SEQ ID NO: 12807 - DNA, 24 bp, Artificial Sequence
  Chr12_9 Reverse Primer
tttttcatttttctgtggtttctg

SEQ ID NO: 12808 - DNA, 20 bp, Artificial Sequence
  Chr12_9 Reverse Primer
gactagcaaaacaggctggg

SEQ ID NO: 12809 - DNA, 20 bp, Artificial Sequence
  Chr12_9 Reverse Primer
tgaaaatcgtttccaaaccc

SEQ ID NO: 12810 - DNA, 20 bp, Artificial Sequence
  Chr12_9 Reverse Primer
tgcacaaaaccacaaagtca

SEQ ID NO: 12811 - DNA, 25 bp, Artificial Sequence
  Chr12_9 Reverse Primer
tgaaatgactagaaagtctgtttgc

SEQ ID NO: 12812 - DNA, 20 bp, Artificial Sequence
  Chr12_9 Reverse Primer
aacctctcagtggtggtgct

SEQ ID NO: 12813 - DNA, 20 bp, Artificial Sequence
  Chr12_9 Reverse Primer
gttgtcaacatcctcccaca

SEQ ID NO: 12814 - DNA, 20 bp, Artificial Sequence
  Chr12_9 Reverse Primer
aggagacaaggaggaggagg

SEQ ID NO: 12815 - DNA, 20 bp, Artificial Sequence
  Chr12_9 Reverse Primer
atgaaatgtgggtcagggag

SEQ ID NO: 12816 - DNA, 20 bp, Artificial Sequence
  Chr12_9 Reverse Primer
gcctcttccttgctctctca

SEQ ID NO: 12817 - DNA, 20 bp, Artificial Sequence
  Chr12_9 Reverse Primer
tcatacctttgcagtgccag

SEQ ID NO: 12818 - DNA, 23 bp, Artificial Sequence
  Chr12_9 Reverse Primer
tgcagcatcagttctgaatatgt

SEQ ID NO: 12819 - DNA, 20 bp, Artificial Sequence
  Chr12_9 Reverse Primer
ctgggagatgggctgtaaaa

SEQ ID NO: 12820 - DNA, 20 bp, Artificial Sequence
  Chr12_9 Reverse Primer
tccacataaaacccagagcc

SEQ ID NO: 12821 - DNA, 20 bp, Artificial Sequence
  Chr12_9 Reverse Primer
tagccctctaagtggtcccc

SEQ ID NO: 12822 - DNA, 27 bp, Artificial Sequence
  Chr12_9 Reverse Primer
tttgtgactctgttttctaatctatga

SEQ ID NO: 12823 - DNA, 20 bp, Artificial Sequence
  Chr12_9 Reverse Primer
tcctccataacctttgctca

SEQ ID NO: 12824 - DNA, 20 bp, Artificial Sequence
  Chr12_9 Reverse Primer
ccgaaactgtggcaagaaat

SEQ ID NO: 12825 - DNA, 20 bp, Artificial Sequence
  Chr12_9 Reverse Primer
gctaatgccctttcctttcc

SEQ ID NO: 12826 - DNA, 20 bp, Artificial Sequence
  Chr12_9 Reverse Primer
gggggaggaggtagtattgg

SEQ ID NO: 12827 - DNA, 20 bp, Artificial Sequence
  Chr12_9 Reverse Primer
aagctgggagaaaggaggtc

SEQ ID NO: 12828 - DNA, 18 bp, Artificial Sequence
  Chr12_9 Reverse Primer
cgtgaccaaccctccatc

SEQ ID NO: 12829 - DNA, 20 bp, Artificial Sequence
  Chr12_9 Reverse Primer
gactcctctcctcctcctcg

SEQ ID NO: 12830 - DNA, 20 bp, Artificial Sequence
  Chr12_9 Reverse Primer
cccggtgtttgatttaggtg

SEQ ID NO: 12831 - DNA, 20 bp, Artificial Sequence
  Chr12_9 Reverse Primer
acgggacagggaggatctat

SEQ ID NO: 12832 - DNA, 20 bp, Artificial Sequence
  Chr12_9 Reverse Primer
cagaaatgagaaagccgagg

SEQ ID NO: 12833 - DNA, 20 bp, Artificial Sequence
  Chr12_9 Reverse Primer
gacaccggaaggacacaaat

SEQ ID NO: 12834 - DNA, 20 bp, Artificial Sequence
  Chr12_9 Reverse Primer
cccctcactgtcaaccactt

SEQ ID NO: 12835 - DNA, 20 bp, Artificial Sequence
  Chr12_9 Reverse Primer
agcaggtgcaccattacaca

SEQ ID NO: 12836 - DNA, 20 bp, Artificial Sequence
  Chr12_9 Reverse Primer
agacagcaatgaacaagggc

SEQ ID NO: 12837 - DNA, 20 bp, Artificial Sequence
  Chr12_9 Reverse Primer
ttcacagttacaggccctca

SEQ ID NO: 12838 - DNA, 25 bp, Artificial Sequence
  Chr12_9 Reverse Primer
agaaaatatatcagaaaagccacaa

SEQ ID NO: 12839 - DNA, 20 bp, Artificial Sequence
  Chr12_9 Reverse Primer
ccatctcccttgagtgcttc

SEQ ID NO: 12840 - DNA, 21 bp, Artificial Sequence
  Chr12_9 Reverse Primer
tgtttcatcacatcagaggca

SEQ ID NO: 12841 - DNA, 20 bp, Artificial Sequence
  Chr12_9 Reverse Primer
tgcagagagttttgggtcag

SEQ ID NO: 12842 - DNA, 23 bp, Artificial Sequence
  Chr12_9 Reverse Primer
tggttgagtttaacaaatgcaaa

SEQ ID NO: 12843 - DNA, 27 bp, Artificial Sequence
  Chr12_9 Reverse Primer
aacaataacattaaaagatcaagcaga

SEQ ID NO: 12844 - DNA, 22 bp, Artificial Sequence
  Chr12_9 Reverse Primer
tgatacaaagagagcttctccc

SEQ ID NO: 12845 - DNA, 20 bp, Artificial Sequence
  Chr12_9 Reverse Primer
gtgacaggctcaatggaggt

SEQ ID NO: 12846 - DNA, 20 bp, Artificial Sequence
  Chr12_9 Reverse Primer
gagacaacgcacctttagcc

SEQ ID NO: 12847 - DNA, 20 bp, Artificial Sequence
  Chr12_9 Reverse Primer
ataacccaccgttcctttcc

SEQ ID NO: 12848 - DNA, 20 bp, Artificial Sequence
  Chr12_9 Reverse Primer
tgttttgtgggatgcttgtt

SEQ ID NO: 12849 - DNA, 20 bp, Artificial Sequence
  Chr12_9 Reverse Primer
agacccaaaataaggccagg

SEQ ID NO: 12850 - DNA, 20 bp, Artificial Sequence
  Chr12_9 Reverse Primer
ccctcaagcaatgtggtaca

SEQ ID NO: 12851 - DNA, 20 bp, Artificial Sequence
  Chr12_9 Reverse Primer
gcacacagctgctattccaa

SEQ ID NO: 12852 - DNA, 20 bp, Artificial Sequence
  Chr12_9 Reverse Primer
gtggccactcttcagcaaat

SEQ ID NO: 12853 - DNA, 22 bp, Artificial Sequence
  Chr12_9 Reverse Primer
tttgcatcctttcagtgtcttt

SEQ ID NO: 12854 - DNA, 20 bp, Artificial Sequence
  Chr12_9 Reverse Primer
tagccaccacctaaagcacc

SEQ ID NO: 12855 - DNA, 20 bp, Artificial Sequence
  Chr12_9 Reverse Primer
attatttggggcaggagagg

SEQ ID NO: 12856 - DNA, 23 bp, Artificial Sequence
  Chr12_9 Reverse Primer
gaagtttaccaaacgaattcagg

SEQ ID NO: 12857 - DNA, 24 bp, Artificial Sequence
  Chr12_9 Reverse Primer
tcctgatgacatacaagaggtttt

SEQ ID NO: 12858 - DNA, 20 bp, Artificial Sequence
  Chr12_9 Reverse Primer
gccatctcagcatcccttta

SEQ ID NO: 12859 - DNA, 20 bp, Artificial Sequence
  Chr12_9 Reverse Primer
ccctaggcaactgcgtatca

SEQ ID NO: 12860 - DNA, 20 bp, Artificial Sequence
  Chr12_9 Reverse Primer
catcacttggtgcctgaatg

SEQ ID NO: 12861 - DNA, 20 bp, Artificial Sequence
  Chr12_9 Reverse Primer
cgttcacaaccctgcctcta

SEQ ID NO: 12862 - DNA, 20 bp, Artificial Sequence
  Chr12_9 Reverse Primer
ccctggtccaaccactctac

SEQ ID NO: 12863 - DNA, 20 bp, Artificial Sequence
  Chr12_9 Reverse Primer
gtcggtttactccgcagaag

SEQ ID NO: 12864 - DNA, 20 bp, Artificial Sequence
  Chr12_9 Reverse Primer
ccaaaatgtaccaccaggct

SEQ ID NO: 12865 - DNA, 20 bp, Artificial Sequence
  Chr12_9 Reverse Primer
cttgtatgggtgcctgtgtg

SEQ ID NO: 12866 - DNA, 21 bp, Artificial Sequence
  Chr12_9 Reverse Primer
caaatataaccaaccccatcg

SEQ ID NO: 12867 - DNA, 22 bp, Artificial Sequence
  Chr12_9 Reverse Primer
ccaacaagaaccaaaagtgttc

SEQ ID NO: 12868 - DNA, 20 bp, Artificial Sequence
  Chr12_9 Reverse Primer
acagttggtttcttgcacca

SEQ ID NO: 12869 - DNA, 24 bp, Artificial Sequence
  Chr12_9 Reverse Primer
aacttcattttcaaccagttttca

SEQ ID NO: 12870 - DNA, 24 bp, Artificial Sequence
  Chr12_9 Reverse Primer
tgtttcaaaacacacaaatagctt

SEQ ID NO: 12871 - DNA, 23 bp, Artificial Sequence
  Chr12_9 Reverse Primer
gggtgccaataaattagctacaa

SEQ ID NO: 12872 - DNA, 20 bp, Artificial Sequence
  Chr12_9 Reverse Primer
ttaaatcaaaggccaatgcc

SEQ ID NO: 12873 - DNA, 20 bp, Artificial Sequence
  Chr12_9 Reverse Primer
tctcacaagtgcctccttcc

SEQ ID NO: 12874 - DNA, 20 bp, Artificial Sequence
  Chr12_9 Reverse Primer
tggcaatacaaatcctccaa

SEQ ID NO: 12875 - DNA, 20 bp, Artificial Sequence
  Chr12_9 Reverse Primer
tgaagcatccacacaacaca

SEQ ID NO: 12876 - DNA, 20 bp, Artificial Sequence
  Chr12_9 Reverse Primer
ccattccccaagtcaggata

SEQ ID NO: 12877 - DNA, 20 bp, Artificial Sequence
  Chr12_9 Reverse Primer
attgccaagggtcatgagag

SEQ ID NO: 12878 - DNA, 20 bp, Artificial Sequence
  Chr12_9 Reverse Primer
gggtccatgccatctagtca

SEQ ID NO: 12879 - DNA, 20 bp, Artificial Sequence
  Chr12_9 Reverse Primer
actgcttggaaacacaggct

SEQ ID NO: 12880 - DNA, 20 bp, Artificial Sequence
  Chr12_9 Reverse Primer
catggctttttcttgccaat

SEQ ID NO: 12881 - DNA, 20 bp, Artificial Sequence
  Chr12_10 Forward Primer
tacaagaactcccagccacc

SEQ ID NO: 12882 - DNA, 20 bp, Artificial Sequence
  Chr12_10 Forward Primer
tgtgggaggagagtgagacc

SEQ ID NO: 12883 - DNA, 20 bp, Artificial Sequence
  Chr12_10 Forward Primer
tgttccatgttgttcaggga

SEQ ID NO: 12884 - DNA, 20 bp, Artificial Sequence
  Chr12_10 Forward Primer
ttgccaccttcattaaagcc

SEQ ID NO: 12885 - DNA, 20 bp, Artificial Sequence
  Chr12_10 Forward Primer
ggagtcaaggaactgaccca

SEQ ID NO: 12886 - DNA, 20 bp, Artificial Sequence
  Chr12_10 Forward Primer
tgtcccagcaaactcacaag

SEQ ID NO: 12887 - DNA, 20 bp, Artificial Sequence
  Chr12_10 Forward Primer
gccttgtgactcctggaaac

SEQ ID NO: 12888 - DNA, 20 bp, Artificial Sequence
  Chr12_10 Forward Primer
ttaaatcaccgaaagccagg

SEQ ID NO: 12889 - DNA, 22 bp, Artificial Sequence
  Chr12_10 Forward Primer
tactcatttggatgggtttgtg

SEQ ID NO: 12890 - DNA, 23 bp, Artificial Sequence
  Chr12_10 Forward Primer
gctgtgtggtctagggaataaga

SEQ ID NO: 12891 - DNA, 20 bp, Artificial Sequence
  Chr12_10 Forward Primer
ggaaaagtgaagtggctgga

SEQ ID NO: 12892 - DNA, 20 bp, Artificial Sequence
  Chr12_10 Forward Primer
tcattgtttcccattcccat

SEQ ID NO: 12893 - DNA, 20 bp, Artificial Sequence
  Chr12_10 Forward Primer
ggcttgaatgaagacttcgc

SEQ ID NO: 12894 - DNA, 20 bp, Artificial Sequence
  Chr12_10 Forward Primer
agttgggaagctctgcctta

SEQ ID NO: 12895 - DNA, 20 bp, Artificial Sequence
  Chr12_10 Forward Primer
accttgggccatttacagtg

SEQ ID NO: 12896 - DNA, 20 bp, Artificial Sequence
  Chr12_10 Forward Primer
ccacctggcagctgttaaat

SEQ ID NO: 12897 - DNA, 20 bp, Artificial Sequence
  Chr12_10 Forward Primer
ctggcttccagaatcagagc

SEQ ID NO: 12898 - DNA, 20 bp, Artificial Sequence
  Chr12_10 Forward Primer
ggcctgtctgttgctctacc

SEQ ID NO: 12899 - DNA, 20 bp, Artificial Sequence
  Chr12_10 Forward Primer
tgcaccagcttctcctaaca

SEQ ID NO: 12900 - DNA, 20 bp, Artificial Sequence
  Chr12_10 Forward Primer
atgggttggaagctcaccta

SEQ ID NO: 12901 - DNA, 20 bp, Artificial Sequence
  Chr12_10 Forward Primer
tgctgtaccattcctagccc

SEQ ID NO: 12902 - DNA, 21 bp, Artificial Sequence
  Chr12_10 Forward Primer
tctctgttctctgaggatggg

SEQ ID NO: 12903 - DNA, 26 bp, Artificial Sequence
  Chr12_10 Forward Primer
gaatgagaggagatagaaatgaatcc

SEQ ID NO: 12904 - DNA, 22 bp, Artificial Sequence
  Chr12_10 Forward Primer
ggaaggagatgccttattctga

SEQ ID NO: 12905 - DNA, 20 bp, Artificial Sequence
  Chr12_10 Forward Primer
gcaaaaatgctgcaagttca

SEQ ID NO: 12906 - DNA, 20 bp, Artificial Sequence
  Chr12_10 Forward Primer
cctgacctgcctaagcaaag

SEQ ID NO: 12907 - DNA, 23 bp, Artificial Sequence
  Chr12_10 Forward Primer
aagccaaacatgtatgtagcatc

SEQ ID NO: 12908 - DNA, 22 bp, Artificial Sequence
  Chr12_10 Forward Primer
ttatctaaggctcccagacacc

SEQ ID NO: 12909 - DNA, 20 bp, Artificial Sequence
  Chr12_10 Forward Primer
gagggaatgggtgtacgaga

SEQ ID NO: 12910 - DNA, 21 bp, Artificial Sequence
  Chr12_10 Forward Primer
tcagtttacatgcctctttgc

SEQ ID NO: 12911 - DNA, 21 bp, Artificial Sequence
  Chr12_10 Forward Primer
tttcagaaacttggaggctca

SEQ ID NO: 12912 - DNA, 22 bp, Artificial Sequence
  Chr12_10 Forward Primer
tggtagcaggtcataaatccaa

SEQ ID NO: 12913 - DNA, 20 bp, Artificial Sequence
  Chr12_10 Forward Primer
ttgaccttggggagctctta

SEQ ID NO: 12914 - DNA, 20 bp, Artificial Sequence
  Chr12_10 Forward Primer
tctccaagagcagaagggaa

SEQ ID NO: 12915 - DNA, 20 bp, Artificial Sequence
  Chr12_10 Forward Primer
cggctggaaatcacttcttt

SEQ ID NO: 12916 - DNA, 20 bp, Artificial Sequence
  Chr12_10 Forward Primer
cctcgggcctattaacttga

SEQ ID NO: 12917 - DNA, 20 bp, Artificial Sequence
  Chr12_10 Forward Primer
tgcctggaataacctggaag

SEQ ID NO: 12918 - DNA, 21 bp, Artificial Sequence
  Chr12_10 Forward Primer
actggggtagttcttgcagtt

SEQ ID NO: 12919 - DNA, 20 bp, Artificial Sequence
  Chr12_10 Forward Primer
tctttgaggccagctaggaa

SEQ ID NO: 12920 - DNA, 23 bp, Artificial Sequence
  Chr12_10 Forward Primer
gtggtgaagaacaaagaagaaaa

SEQ ID NO: 12921 - DNA, 20 bp, Artificial Sequence
  Chr12_10 Forward Primer
ctcccaccctcgttaaaaca

SEQ ID NO: 12922 - DNA, 22 bp, Artificial Sequence
  Chr12_10 Forward Primer
ttttgtgtttttctctcaccca

SEQ ID NO: 12923 - DNA, 20 bp, Artificial Sequence
  Chr12_10 Forward Primer
aggaaatgggggaagaattg

SEQ ID NO: 12924 - DNA, 20 bp, Artificial Sequence
  Chr12_10 Forward Primer
ggtcactgccctcagtctct

SEQ ID NO: 12925 - DNA, 22 bp, Artificial Sequence
  Chr12_10 Forward Primer
agcccaaatatgtgagaaattg

SEQ ID NO: 12926 - DNA, 22 bp, Artificial Sequence
  Chr12_10 Forward Primer
ttttgagctaggaaaatcctca

SEQ ID NO: 12927 - DNA, 20 bp, Artificial Sequence
  Chr12_10 Forward Primer
ttccttcatggcctgtcaat

SEQ ID NO: 12928 - DNA, 20 bp, Artificial Sequence
  Chr12_10 Forward Primer
ggcttttgtacaaggcaagc

SEQ ID NO: 12929 - DNA, 20 bp, Artificial Sequence
  Chr12_10 Forward Primer
catgaatccagcaaccacag

SEQ ID NO: 12930 - DNA, 24 bp, Artificial Sequence
  Chr12_10 Forward Primer
ttgaacaacattaaaacaccactg

SEQ ID NO: 12931 - DNA, 24 bp, Artificial Sequence
  Chr12_10 Forward Primer
tgatccagttcaaggaattacaga

SEQ ID NO: 12932 - DNA, 23 bp, Artificial Sequence
  Chr12_10 Forward Primer
tccatggttttatagccaaagtg

SEQ ID NO: 12933 - DNA, 22 bp, Artificial Sequence
  Chr12_10 Forward Primer
ggtttttgtgtttgtttccctc

SEQ ID NO: 12934 - DNA, 21 bp, Artificial Sequence
  Chr12_10 Forward Primer
cgaaaacacattaaattgggg

SEQ ID NO: 12935 - DNA, 23 bp, Artificial Sequence
  Chr12_10 Forward Primer
cagtggtgctgtgaatatctgtg

SEQ ID NO: 12936 - DNA, 24 bp, Artificial Sequence
  Chr12_10 Forward Primer
agctaatgacaacagggtttactt

SEQ ID NO: 12937 - DNA, 20 bp, Artificial Sequence
  Chr12_10 Forward Primer
ttcgattccattgttcagca

SEQ ID NO: 12938 - DNA, 21 bp, Artificial Sequence
  Chr12_10 Forward Primer
tcaccaataagaccacagcaa

SEQ ID NO: 12939 - DNA, 20 bp, Artificial Sequence
  Chr12_10 Forward Primer
ttctttgcaatacaacccca

SEQ ID NO: 12940 - DNA, 21 bp, Artificial Sequence
  Chr12_10 Forward Primer
tgcaacaaaaacagcaacaag

SEQ ID NO: 12941 - DNA, 20 bp, Artificial Sequence
  Chr12_10 Forward Primer
caaccagtgtccaaaccaaa

SEQ ID NO: 12942 - DNA, 23 bp, Artificial Sequence
  Chr12_10 Forward Primer
tgaaactacatgaataccaccaa

SEQ ID NO: 12943 - DNA, 21 bp, Artificial Sequence
  Chr12_10 Forward Primer
gccaaatgtttcaggcactaa

SEQ ID NO: 12944 - DNA, 22 bp, Artificial Sequence
  Chr12_10 Forward Primer
aaccaaaagctagactgcatga

SEQ ID NO: 12945 - DNA, 24 bp, Artificial Sequence
  Chr12_10 Forward Primer
gattatttctaacttgctgccaga

SEQ ID NO: 12946 - DNA, 24 bp, Artificial Sequence
  Chr12_10 Forward Primer
gaatctctgaggtctctgaaacaa

SEQ ID NO: 12947 - DNA, 21 bp, Artificial Sequence
  Chr12_10 Forward Primer
tccagctttctttgcaattct

SEQ ID NO: 12948 - DNA, 22 bp, Artificial Sequence
  Chr12_10 Forward Primer
gaggcttatgcacttttctcaa

SEQ ID NO: 12949 - DNA, 21 bp, Artificial Sequence
  Chr12_10 Forward Primer
cactccttcttcacagtgcct

SEQ ID NO: 12950 - DNA, 20 bp, Artificial Sequence
  Chr12_10 Forward Primer
tccaccagagcaggaaagac

SEQ ID NO: 12951 - DNA, 20 bp, Artificial Sequence
  Chr12_10 Forward Primer
caacattcgttttgacccaa

SEQ ID NO: 12952 - DNA, 23 bp, Artificial Sequence
  Chr12_10 Forward Primer
cagtcctctcactggattgattt

SEQ ID NO: 12953 - DNA, 21 bp, Artificial Sequence
  Chr12_10 Forward Primer
ctgttgaaaaagtagggccaa

SEQ ID NO: 12954 - DNA, 23 bp, Artificial Sequence
  Chr12_10 Forward Primer
ttccctgatttaaggaagtcaca

SEQ ID NO: 12955 - DNA, 27 bp, Artificial Sequence
  Chr12_10 Forward Primer
acagattatgaaaggactttaggaaga

SEQ ID NO: 12956 - DNA, 21 bp, Artificial Sequence
  Chr12_10 Forward Primer
gcaatacaaaagcactctggc

SEQ ID NO: 12957 - DNA, 25 bp, Artificial Sequence
  Chr12_10 Forward Primer
gccaatttagacttctcatttacca

SEQ ID NO: 12958 - DNA, 25 bp, Artificial Sequence
  Chr12_10 Forward Primer
tggtcagagtaatgatactgcaaaa

SEQ ID NO: 12959 - DNA, 25 bp, Artificial Sequence
  Chr12_10 Forward Primer
ttagtaaaccaatgctttcaacttt

SEQ ID NO: 12960 - DNA, 21 bp, Artificial Sequence
  Chr12_10 Forward Primer
ggtccctctgagagagctgtt

SEQ ID NO: 12961 - DNA, 25 bp, Artificial Sequence
  Chr12_10 Forward Primer
tcccaaattattatatgccatgttt

SEQ ID NO: 12962 - DNA, 24 bp, Artificial Sequence
  Chr12_10 Forward Primer
gggaccatatcagatacactcaga

SEQ ID NO: 12963 - DNA, 20 bp, Artificial Sequence
  Chr12_10 Forward Primer
ggaaaggggaagctttttca

SEQ ID NO: 12964 - DNA, 21 bp, Artificial Sequence
  Chr12_10 Forward Primer
gaacactaaaccccttgaggc

SEQ ID NO: 12965 - DNA, 20 bp, Artificial Sequence
  Chr12_10 Forward Primer
atgctgtggagtggggttta

SEQ ID NO: 12966 - DNA, 20 bp, Artificial Sequence
  Chr12_10 Forward Primer
tcctttctgaacatgccaag

SEQ ID NO: 12967 - DNA, 23 bp, Artificial Sequence
  Chr12_10 Forward Primer
ttgtctattcagcaagttttccc

SEQ ID NO: 12968 - DNA, 20 bp, Artificial Sequence
  Chr12_10 Forward Primer
taatccagcagatggggcta

SEQ ID NO: 12969 - DNA, 24 bp, Artificial Sequence
  Chr12_10 Forward Primer
tctgaacttccctaggaattgact

SEQ ID NO: 12970 - DNA, 20 bp, Artificial Sequence
  Chr12_10 Forward Primer
actctatggcagccttgtcc

SEQ ID NO: 12971 - DNA, 20 bp, Artificial Sequence
  Chr12_10 Forward Primer
ccacttttctccatccttgc

SEQ ID NO: 12972 - DNA, 20 bp, Artificial Sequence
  Chr12_10 Forward Primer
ggtccaatccaagctgtctg

SEQ ID NO: 12973 - DNA, 20 bp, Artificial Sequence
  Chr12_10 Forward Primer
tcaagtcccacctccttcat

SEQ ID NO: 12974 - DNA, 21 bp, Artificial Sequence
  Chr12_10 Forward Primer
cccttttcccattatccttca

SEQ ID NO: 12975 - DNA, 24 bp, Artificial Sequence
  Chr12_10 Forward Primer
agttattcacacacaaagacagca

SEQ ID NO: 12976 - DNA, 20 bp, Artificial Sequence
  Chr12_10 Forward Primer
gcctggtggctagaagttca

SEQ ID NO: 12977 - DNA, 20 bp, Artificial Sequence
  Chr12_10 Reverse Primer
ccaaggtctcctccaaatga

SEQ ID NO: 12978 - DNA, 20 bp, Artificial Sequence
  Chr12_10 Reverse Primer
ggttgtgaagaggggtcaaa

SEQ ID NO: 12979 - DNA, 20 bp, Artificial Sequence
  Chr12_10 Reverse Primer
ccagagatgtcttcaagccc

SEQ ID NO: 12980 - DNA, 20 bp, Artificial Sequence
  Chr12_10 Reverse Primer
ttctagggtatgccagcacc

SEQ ID NO: 12981 - DNA, 20 bp, Artificial Sequence
  Chr12_10 Reverse Primer
gtgggttccagccttgttta

SEQ ID NO: 12982 - DNA, 20 bp, Artificial Sequence
  Chr12_10 Reverse Primer
cggatatcgagtgagcctct

SEQ ID NO: 12983 - DNA, 20 bp, Artificial Sequence
  Chr12_10 Reverse Primer
cacttggagacagagccaca

SEQ ID NO: 12984 - DNA, 20 bp, Artificial Sequence
  Chr12_10 Reverse Primer
aattgttcccttctgatgcc

SEQ ID NO: 12985 - DNA, 20 bp, Artificial Sequence
  Chr12_10 Reverse Primer
tttttgaaaacatggagggc

SEQ ID NO: 12986 - DNA, 19 bp, Artificial Sequence
  Chr12_10 Reverse Primer
cccctggagccagacaata

SEQ ID NO: 12987 - DNA, 20 bp, Artificial Sequence
  Chr12_10 Reverse Primer
cttcaagtggacagatgggg

SEQ ID NO: 12988 - DNA, 20 bp, Artificial Sequence
  Chr12_10 Reverse Primer
gaaggtgtctgctggttggt

SEQ ID NO: 12989 - DNA, 20 bp, Artificial Sequence
  Chr12_10 Reverse Primer
ttgattgtctggctcattgg

SEQ ID NO: 12990 - DNA, 20 bp, Artificial Sequence
  Chr12_10 Reverse Primer
tctgcctccaagacttctcc

SEQ ID NO: 12991 - DNA, 20 bp, Artificial Sequence
  Chr12_10 Reverse Primer
tgcctggtcaagattttgtg

SEQ ID NO: 12992 - DNA, 20 bp, Artificial Sequence
  Chr12_10 Reverse Primer
ccagctggtactcggtcatt

SEQ ID NO: 12993 - DNA, 20 bp, Artificial Sequence
  Chr12_10 Reverse Primer
caccactgaacttccggttt

SEQ ID NO: 12994 - DNA, 20 bp, Artificial Sequence
  Chr12_10 Reverse Primer
ttcaggtggggctaattttg

SEQ ID NO: 12995 - DNA, 20 bp, Artificial Sequence
  Chr12_10 Reverse Primer
ttgactccttgacccactcc

SEQ ID NO: 12996 - DNA, 20 bp, Artificial Sequence
  Chr12_10 Reverse Primer
ttggcttgatgccatgtaga

SEQ ID NO: 12997 - DNA, 20 bp, Artificial Sequence
  Chr12_10 Reverse Primer
atcttgggccacacagaaga

SEQ ID NO: 12998 - DNA, 20 bp, Artificial Sequence
  Chr12_10 Reverse Primer
tgcataggggagaaatctgg

SEQ ID NO: 12999 - DNA, 24 bp, Artificial Sequence
  Chr12_10 Reverse Primer
ttcagaggaaaaggtttttagagg

SEQ ID NO: 13000 - DNA, 18 bp, Artificial Sequence
  Chr12_10 Reverse Primer
tatggcggcctaggttga

SEQ ID NO: 13001 - DNA, 20 bp, Artificial Sequence
  Chr12_10 Reverse Primer
caggggctccaatcatgtag

SEQ ID NO: 13002 - DNA, 20 bp, Artificial Sequence
  Chr12_10 Reverse Primer
ctccctctctcctccacctc

SEQ ID NO: 13003 - DNA, 23 bp, Artificial Sequence
  Chr12_10 Reverse Primer
cattcaggaaacagattgtgaaa

SEQ ID NO: 13004 - DNA, 21 bp, Artificial Sequence
  Chr12_10 Reverse Primer
agctcaactaaccaacatgcc

SEQ ID NO: 13005 - DNA, 20 bp, Artificial Sequence
  Chr12_10 Reverse Primer
acatgggctgccattaattc

SEQ ID NO: 13006 - DNA, 19 bp, Artificial Sequence
  Chr12_10 Reverse Primer
cgatgaatgagaaaggggg

SEQ ID NO: 13007 - DNA, 20 bp, Artificial Sequence
  Chr12_10 Reverse Primer
tggcaaacagatgagctgaa

SEQ ID NO: 13008 - DNA, 25 bp, Artificial Sequence
  Chr12_10 Reverse Primer
tttcacagactctcactgaaataga

SEQ ID NO: 13009 - DNA, 20 bp, Artificial Sequence
  Chr12_10 Reverse Primer
gtgagcgctttctcttttcc

SEQ ID NO: 13010 - DNA, 20 bp, Artificial Sequence
  Chr12_10 Reverse Primer
taccctttttgtggcttgct

SEQ ID NO: 13011 - DNA, 20 bp, Artificial Sequence
  Chr12_10 Reverse Primer
catcctcttcctcatgggtg

SEQ ID NO: 13012 - DNA, 21 bp, Artificial Sequence
  Chr12_10 Reverse Primer
aaccctgtgagataggtcagc

SEQ ID NO: 13013 - DNA, 20 bp, Artificial Sequence
  Chr12_10 Reverse Primer
tctctgcagcgagaggactt

SEQ ID NO: 13014 - DNA, 20 bp, Artificial Sequence
  Chr12_10 Reverse Primer
gtctcctgcccacatcaagt

SEQ ID NO: 13015 - DNA, 20 bp, Artificial Sequence
  Chr12_10 Reverse Primer
agggaagtcacatccaacca

SEQ ID NO: 13016 - DNA, 20 bp, Artificial Sequence
  Chr12_10 Reverse Primer
ccccaccactatgtccaaat

SEQ ID NO: 13017 - DNA, 20 bp, Artificial Sequence
  Chr12_10 Reverse Primer
gttttccgtttgggcttgta

SEQ ID NO: 13018 - DNA, 20 bp, Artificial Sequence
  Chr12_10 Reverse Primer
ggcagttcttgagcttctgc

SEQ ID NO: 13019 - DNA, 20 bp, Artificial Sequence
  Chr12_10 Reverse Primer
agaaaccagagtcaggcagc

SEQ ID NO: 13020 - DNA, 20 bp, Artificial Sequence
  Chr12_10 Reverse Primer
ggaaaatgcagatgggctaa

SEQ ID NO: 13021 - DNA, 20 bp, Artificial Sequence
  Chr12_10 Reverse Primer
tgccacttgttttaggtccc

SEQ ID NO: 13022 - DNA, 21 bp, Artificial Sequence
  Chr12_10 Reverse Primer
gcagtggacattgttttcctt

SEQ ID NO: 13023 - DNA, 21 bp, Artificial Sequence
  Chr12_10 Reverse Primer
ttgggattttctacttccacg

SEQ ID NO: 13024 - DNA, 20 bp, Artificial Sequence
  Chr12_10 Reverse Primer
actgctttcagtcccatcca

SEQ ID NO: 13025 - DNA, 22 bp, Artificial Sequence
  Chr12_10 Reverse Primer
ccctccaaagagtttaatgtgc

SEQ ID NO: 13026 - DNA, 23 bp, Artificial Sequence
  Chr12_10 Reverse Primer
ggatccttattgaattgttgctt

SEQ ID NO: 13027 - DNA, 21 bp, Artificial Sequence
  Chr12_10 Reverse Primer
aattgcccttagcctgaattt

SEQ ID NO: 13028 - DNA, 21 bp, Artificial Sequence
  Chr12_10 Reverse Primer
gccaaatttgttattttccca

SEQ ID NO: 13029 - DNA, 20 bp, Artificial Sequence
  Chr12_10 Reverse Primer
gctggcatgtacagctcttg

SEQ ID NO: 13030 - DNA, 20 bp, Artificial Sequence
  Chr12_10 Reverse Primer
caggccttctgtctgtctcc

SEQ ID NO: 13031 - DNA, 20 bp, Artificial Sequence
  Chr12_10 Reverse Primer
tccctggacttggataaaca

SEQ ID NO: 13032 - DNA, 27 bp, Artificial Sequence
  Chr12_10 Reverse Primer
aagtgtagttatacattcattcagtgc

SEQ ID NO: 13033 - DNA, 20 bp, Artificial Sequence
  Chr12_10 Reverse Primer
tccatgtcaactgttcccag

SEQ ID NO: 13034 - DNA, 21 bp, Artificial Sequence
  Chr12_10 Reverse Primer
cggtttcttgtaagtgggaag

SEQ ID NO: 13035 - DNA, 20 bp, Artificial Sequence
  Chr12_10 Reverse Primer
gtgggttcatggttcagttg

SEQ ID NO: 13036 - DNA, 20 bp, Artificial Sequence
  Chr12_10 Reverse Primer
cctggaatagctttcatgcc

SEQ ID NO: 13037 - DNA, 20 bp, Artificial Sequence
  Chr12_10 Reverse Primer
ctgccgacagtgtggaaata

SEQ ID NO: 13038 - DNA, 20 bp, Artificial Sequence
  Chr12_10 Reverse Primer
tgcctcctctggttcttttg

SEQ ID NO: 13039 - DNA, 22 bp, Artificial Sequence
  Chr12_10 Reverse Primer
ttcagtccttgtcttccaactt

SEQ ID NO: 13040 - DNA, 20 bp, Artificial Sequence
  Chr12_10 Reverse Primer
aaaactgtatggcctgtggg

SEQ ID NO: 13041 - DNA, 21 bp, Artificial Sequence
  Chr12_10 Reverse Primer
gaatggattggaaatcagcaa

SEQ ID NO: 13042 - DNA, 20 bp, Artificial Sequence
  Chr12_10 Reverse Primer
gggcagagaaaaccaatcac

SEQ ID NO: 13043 - DNA, 27 bp, Artificial Sequence
  Chr12_10 Reverse Primer
gccatttaaaaattaacctgtaaaaca

SEQ ID NO: 13044 - DNA, 20 bp, Artificial Sequence
  Chr12_10 Reverse Primer
tgagcttgagaaacaaacgg

SEQ ID NO: 13045 - DNA, 20 bp, Artificial Sequence
  Chr12_10 Reverse Primer
cgaagaagcaaattgccagt

SEQ ID NO: 13046 - DNA, 20 bp, Artificial Sequence
  Chr12_10 Reverse Primer
cccagataacttggccattg

SEQ ID NO: 13047 - DNA, 20 bp, Artificial Sequence
  Chr12_10 Reverse Primer
agctgacatgtggttggaaa

SEQ ID NO: 13048 - DNA, 20 bp, Artificial Sequence
  Chr12_10 Reverse Primer
gaacttcaaggaaaagcgga

SEQ ID NO: 13049 - DNA, 23 bp, Artificial Sequence
  Chr12_10 Reverse Primer
tggatttaaatgattgttgagca

SEQ ID NO: 13050 - DNA, 23 bp, Artificial Sequence
  Chr12_10 Reverse Primer
gatagggtacccattgaagaaaa

SEQ ID NO: 13051 - DNA, 23 bp, Artificial Sequence
  Chr12_10 Reverse Primer
acatttgttttcacattacccaa

SEQ ID NO: 13052 - DNA, 20 bp, Artificial Sequence
  Chr12_10 Reverse Primer
cgaagaactcaagtcccaca

SEQ ID NO: 13053 - DNA, 20 bp, Artificial Sequence
  Chr12_10 Reverse Primer
ggaaacagccaagaaccaag

SEQ ID NO: 13054 - DNA, 20 bp, Artificial Sequence
  Chr12_10 Reverse Primer
cttgctttggttttggctct

SEQ ID NO: 13055 - DNA, 21 bp, Artificial Sequence
  Chr12_10 Reverse Primer
tttcacaccatagacccttgg

SEQ ID NO: 13056 - DNA, 20 bp, Artificial Sequence
  Chr12_10 Reverse Primer
aaggctacattggagcagga

SEQ ID NO: 13057 - DNA, 20 bp, Artificial Sequence
  Chr12_10 Reverse Primer
ttttggaggctttggaattg

SEQ ID NO: 13058 - DNA, 20 bp, Artificial Sequence
  Chr12_10 Reverse Primer
gattcaggaaccctggacaa

SEQ ID NO: 13059 - DNA, 20 bp, Artificial Sequence
  Chr12_10 Reverse Primer
cgttttctgcctccttttca

SEQ ID NO: 13060 - DNA, 20 bp, Artificial Sequence
  Chr12_10 Reverse Primer
tctcctgccctgtgtagctt

SEQ ID NO: 13061 - DNA, 20 bp, Artificial Sequence
  Chr12_10 Reverse Primer
ctttccaggctctagcaagc

SEQ ID NO: 13062 - DNA, 20 bp, Artificial Sequence
  Chr12_10 Reverse Primer
aacaaaaccatggaatggga

SEQ ID NO: 13063 - DNA, 21 bp, Artificial Sequence
  Chr12_10 Reverse Primer
ccactctttgttgtccaggaa

SEQ ID NO: 13064 - DNA, 20 bp, Artificial Sequence
  Chr12_10 Reverse Primer
gcttcaatgatgttggatgg

SEQ ID NO: 13065 - DNA, 21 bp, Artificial Sequence
  Chr12_10 Reverse Primer
ttgcagagaagacaggcctac

SEQ ID NO: 13066 - DNA, 21 bp, Artificial Sequence
  Chr12_10 Reverse Primer
ggatgtcatttacccaaagca

SEQ ID NO: 13067 - DNA, 20 bp, Artificial Sequence
  Chr12_10 Reverse Primer
caaggaagctttgtggagga

SEQ ID NO: 13068 - DNA, 20 bp, Artificial Sequence
  Chr12_10 Reverse Primer
aacataattgccttgctggc

SEQ ID NO: 13069 - DNA, 20 bp, Artificial Sequence
  Chr12_10 Reverse Primer
tctcacagaggattcagcca

SEQ ID NO: 13070 - DNA, 22 bp, Artificial Sequence
  Chr12_10 Reverse Primer
gcaattttaccattgcttgtca

SEQ ID NO: 13071 - DNA, 20 bp, Artificial Sequence
  Chr12_10 Reverse Primer
caaatgggcaaggaaatgtt

SEQ ID NO: 13072 - DNA, 22 bp, Artificial Sequence
  Chr12_10 Reverse Primer
ttggtttttggaatgcatactg

SEQ ID NO: 13073 - DNA, 21 bp, Artificial Sequence
  Chr12_11 Forward Primer
agatccattcatccatttgct

SEQ ID NO: 13074 - DNA, 20 bp, Artificial Sequence
  Chr12_11 Forward Primer
gggtgacgataccccatcta

SEQ ID NO: 13075 - DNA, 20 bp, Artificial Sequence
  Chr12_11 Forward Primer
tcacagacttccccataggc

SEQ ID NO: 13076 - DNA, 20 bp, Artificial Sequence
  Chr12_11 Forward Primer
gccaatgctgaaaagagagg

SEQ ID NO: 13077 - DNA, 20 bp, Artificial Sequence
  Chr12_11 Forward Primer
tgcactttcaaattgttggg

SEQ ID NO: 13078 - DNA, 20 bp, Artificial Sequence
  Chr12_11 Forward Primer
ctgagacactttgggggaag

SEQ ID NO: 13079 - DNA, 20 bp, Artificial Sequence
  Chr12_11 Forward Primer
actcgccataacaaaccagc

SEQ ID NO: 13080 - DNA, 20 bp, Artificial Sequence
  Chr12_11 Forward Primer
cctgatcccaaacccactta

SEQ ID NO: 13081 - DNA, 21 bp, Artificial Sequence
  Chr12_11 Forward Primer
cccttttataatagcctcccg

SEQ ID NO: 13082 - DNA, 20 bp, Artificial Sequence
  Chr12_11 Forward Primer
ctaaacctgagcggcatgat

SEQ ID NO: 13083 - DNA, 20 bp, Artificial Sequence
  Chr12_11 Forward Primer
ccatcctcccctttcttctc

SEQ ID NO: 13084 - DNA, 20 bp, Artificial Sequence
  Chr12_11 Forward Primer
tccttgcacacagcatctct

SEQ ID NO: 13085 - DNA, 20 bp, Artificial Sequence
  Chr12_11 Forward Primer
cgagtggctgaagaaagagc

SEQ ID NO: 13086 - DNA, 20 bp, Artificial Sequence
  Chr12_11 Forward Primer
ttggctgaatcttagcctgg

SEQ ID NO: 13087 - DNA, 20 bp, Artificial Sequence
  Chr12_11 Forward Primer
tgggcatattttgattggct

SEQ ID NO: 13088 - DNA, 20 bp, Artificial Sequence
  Chr12_11 Forward Primer
ggatcctttcccattttgct

SEQ ID NO: 13089 - DNA, 20 bp, Artificial Sequence
  Chr12_11 Forward Primer
tgttggcctgagtttcaatg

SEQ ID NO: 13090 - DNA, 20 bp, Artificial Sequence
  Chr12_11 Forward Primer
gagcgcttggatgaagagag

SEQ ID NO: 13091 - DNA, 20 bp, Artificial Sequence
  Chr12_11 Forward Primer
gggagagacacattcaagcc

SEQ ID NO: 13092 - DNA, 21 bp, Artificial Sequence
  Chr12_11 Forward Primer
acctggccctctacagaaaaa

SEQ ID NO: 13093 - DNA, 22 bp, Artificial Sequence
  Chr12_11 Forward Primer
tctttgctttccatgatcaata

SEQ ID NO: 13094 - DNA, 20 bp, Artificial Sequence
  Chr12_11 Forward Primer
gctcatttgatcaggcccta

SEQ ID NO: 13095 - DNA, 22 bp, Artificial Sequence
  Chr12_11 Forward Primer
ttctttccagctttcttggaac

SEQ ID NO: 13096 - DNA, 20 bp, Artificial Sequence
  Chr12_11 Forward Primer
atgagtaatttcccggggtc

SEQ ID NO: 13097 - DNA, 20 bp, Artificial Sequence
  Chr12_11 Forward Primer
gctggattctctgggttcaa

SEQ ID NO: 13098 - DNA, 20 bp, Artificial Sequence
  Chr12_11 Forward Primer
tggaacaccctcatgctacc

SEQ ID NO: 13099 - DNA, 20 bp, Artificial Sequence
  Chr12_11 Forward Primer
actcccatctcttccatccc

SEQ ID NO: 13100 - DNA, 20 bp, Artificial Sequence
  Chr12_11 Forward Primer
agaccatcctgtgaaccagc

SEQ ID NO: 13101 - DNA, 22 bp, Artificial Sequence
  Chr12_11 Forward Primer
ttgacataaaccaccctcagaa

SEQ ID NO: 13102 - DNA, 21 bp, Artificial Sequence
  Chr12_11 Forward Primer
tgggttggcttctaatgagtg

SEQ ID NO: 13103 - DNA, 20 bp, Artificial Sequence
  Chr12_11 Forward Primer
agtgtgacagccataacccc

SEQ ID NO: 13104 - DNA, 20 bp, Artificial Sequence
  Chr12_11 Forward Primer
ctcttccttgccactgttcc

SEQ ID NO: 13105 - DNA, 20 bp, Artificial Sequence
  Chr12_11 Forward Primer
aagtttctgagccaggcaga

SEQ ID NO: 13106 - DNA, 20 bp, Artificial Sequence
  Chr12_11 Forward Primer
ctgcttacaggcatgggttt

SEQ ID NO: 13107 - DNA, 20 bp, Artificial Sequence
  Chr12_11 Forward Primer
aaggtcagatccttctggca

SEQ ID NO: 13108 - DNA, 20 bp, Artificial Sequence
  Chr12_11 Forward Primer
gtctttccttcccagcctct

SEQ ID NO: 13109 - DNA, 20 bp, Artificial Sequence
  Chr12_11 Forward Primer
gcctgacatgtaacaagggc

SEQ ID NO: 13110 - DNA, 20 bp, Artificial Sequence
  Chr12_11 Forward Primer
tttgcttgactctggaaggg

SEQ ID NO: 13111 - DNA, 20 bp, Artificial Sequence
  Chr12_11 Forward Primer
gggtaatggctgtctttcca

SEQ ID NO: 13112 - DNA, 20 bp, Artificial Sequence
  Chr12_11 Forward Primer
gtcccaggaataatttggca

SEQ ID NO: 13113 - DNA, 20 bp, Artificial Sequence
  Chr12_11 Forward Primer
tcttccctgctcagatgctt

SEQ ID NO: 13114 - DNA, 21 bp, Artificial Sequence
  Chr12_11 Forward Primer
tgatgtcaagcacacaatagg

SEQ ID NO: 13115 - DNA, 20 bp, Artificial Sequence
  Chr12_11 Forward Primer
ttagccctggactgttttgg

SEQ ID NO: 13116 - DNA, 20 bp, Artificial Sequence
  Chr12_11 Forward Primer
aagacagccttttcactggg

SEQ ID NO: 13117 - DNA, 20 bp, Artificial Sequence
  Chr12_11 Forward Primer
tcagcaagcaagtttttcca

SEQ ID NO: 13118 - DNA, 20 bp, Artificial Sequence
  Chr12_11 Forward Primer
ggtgattcagggcctttgta

SEQ ID NO: 13119 - DNA, 20 bp, Artificial Sequence
  Chr12_11 Forward Primer
ctgcagttggttggttagca

SEQ ID NO: 13120 - DNA, 20 bp, Artificial Sequence
  Chr12_11 Forward Primer
tgccattccatccaattctt

SEQ ID NO: 13121 - DNA, 20 bp, Artificial Sequence
  Chr12_11 Forward Primer
ttgaatcagacagtgcaggc

SEQ ID NO: 13122 - DNA, 22 bp, Artificial Sequence
  Chr12_11 Forward Primer
ctcaaagctgcaatacagatgg

SEQ ID NO: 13123 - DNA, 24 bp, Artificial Sequence
  Chr12_11 Forward Primer
ttcttcaattttgttttcaccttc

SEQ ID NO: 13124 - DNA, 20 bp, Artificial Sequence
  Chr12_11 Forward Primer
gccattgctatcatgcttgt

SEQ ID NO: 13125 - DNA, 20 bp, Artificial Sequence
  Chr12_11 Forward Primer
tatgatgggcctgtggactt

SEQ ID NO: 13126 - DNA, 20 bp, Artificial Sequence
  Chr12_11 Forward Primer
tggaagcgtccttcgagtat

SEQ ID NO: 13127 - DNA, 20 bp, Artificial Sequence
  Chr12_11 Forward Primer
gagaactgctgacaggcaca

SEQ ID NO: 13128 - DNA, 24 bp, Artificial Sequence
  Chr12_11 Forward Primer
ccaaccctataaacattacaaccc

SEQ ID NO: 13129 - DNA, 20 bp, Artificial Sequence
  Chr12_11 Forward Primer
tagagaacagggggtgatgg

SEQ ID NO: 13130 - DNA, 20 bp, Artificial Sequence
  Chr12_11 Forward Primer
ccccacccttgtctgttatg

SEQ ID NO: 13131 - DNA, 20 bp, Artificial Sequence
  Chr12_11 Forward Primer
taagtttaggggtggggctt

SEQ ID NO: 13132 - DNA, 24 bp, Artificial Sequence
  Chr12_11 Forward Primer
gggttatagtaaggcttaagtggg

SEQ ID NO: 13133 - DNA, 20 bp, Artificial Sequence
  Chr12_11 Forward Primer
tgctagccttcccaggagta

SEQ ID NO: 13134 - DNA, 20 bp, Artificial Sequence
  Chr12_11 Forward Primer
tgggggttttgtttgttgtt

SEQ ID NO: 13135 - DNA, 20 bp, Artificial Sequence
  Chr12_11 Forward Primer
atattctggattgggagggg

SEQ ID NO: 13136 - DNA, 23 bp, Artificial Sequence
  Chr12_11 Forward Primer
ttttcagatctcccaaaaagttc

SEQ ID NO: 13137 - DNA, 20 bp, Artificial Sequence
  Chr12_11 Forward Primer
gtttcctttggaaaatggca

SEQ ID NO: 13138 - DNA, 20 bp, Artificial Sequence
  Chr12_11 Forward Primer
gttgtgcctctcctttgagg

SEQ ID NO: 13139 - DNA, 20 bp, Artificial Sequence
  Chr12_11 Forward Primer
gatgagtgtgcattgatggc

SEQ ID NO: 13140 - DNA, 20 bp, Artificial Sequence
  Chr12_11 Forward Primer
tttcaatgtgccatctgctc

SEQ ID NO: 13141 - DNA, 20 bp, Artificial Sequence
  Chr12_11 Forward Primer
agcacaaagaacacctcacg

SEQ ID NO: 13142 - DNA, 22 bp, Artificial Sequence
  Chr12_11 Forward Primer
tgtgctaggcactattcaaagc

SEQ ID NO: 13143 - DNA, 20 bp, Artificial Sequence
  Chr12_11 Forward Primer
ggctcagagagccaatgaac

SEQ ID NO: 13144 - DNA, 21 bp, Artificial Sequence
  Chr12_11 Forward Primer
cgcacgtgatattcaaatctt

SEQ ID NO: 13145 - DNA, 21 bp, Artificial Sequence
  Chr12_11 Forward Primer
agctgtggtatgcactttgct

SEQ ID NO: 13146 - DNA, 20 bp, Artificial Sequence
  Chr12_11 Forward Primer
ttgggtttttccccattttt

SEQ ID NO: 13147 - DNA, 20 bp, Artificial Sequence
  Chr12_11 Forward Primer
aggaaaggcaagtacagcga

SEQ ID NO: 13148 - DNA, 20 bp, Artificial Sequence
  Chr12_11 Forward Primer
tttattccccagctctgtgc

SEQ ID NO: 13149 - DNA, 20 bp, Artificial Sequence
  Chr12_11 Forward Primer
cccagctttgttcagcaact

SEQ ID NO: 13150 - DNA, 20 bp, Artificial Sequence
  Chr12_11 Forward Primer
tgccgaggttcaaagctaat

SEQ ID NO: 13151 - DNA, 20 bp, Artificial Sequence
  Chr12_11 Forward Primer
tgtggggtcttggaaagaag

SEQ ID NO: 13152 - DNA, 20 bp, Artificial Sequence
  Chr12_11 Forward Primer
tcttggcctggaaaagagaa

SEQ ID NO: 13153 - DNA, 21 bp, Artificial Sequence
  Chr12_11 Forward Primer
tggtatgtaccatgaggtccc

SEQ ID NO: 13154 - DNA, 20 bp, Artificial Sequence
  Chr12_11 Forward Primer
taggagtggaggaggcaaga

SEQ ID NO: 13155 - DNA, 20 bp, Artificial Sequence
  Chr12_11 Forward Primer
cgtgatagtggcaatgatgg

SEQ ID NO: 13156 - DNA, 20 bp, Artificial Sequence
  Chr12_11 Forward Primer
ggcaactgagcttactgcct

SEQ ID NO: 13157 - DNA, 20 bp, Artificial Sequence
  Chr12_11 Forward Primer
gaatagctggtaagcggcac

SEQ ID NO: 13158 - DNA, 22 bp, Artificial Sequence
  Chr12_11 Forward Primer
tccttaacactcccatcaaacc

SEQ ID NO: 13159 - DNA, 20 bp, Artificial Sequence
  Chr12_11 Forward Primer
tcatagccaatccagggaaa

SEQ ID NO: 13160 - DNA, 20 bp, Artificial Sequence
  Chr12_11 Forward Primer
tgcttcaagggattgaaagg

SEQ ID NO: 13161 - DNA, 20 bp, Artificial Sequence
  Chr12_11 Forward Primer
tggtcatgctttttgtttgc

SEQ ID NO: 13162 - DNA, 20 bp, Artificial Sequence
  Chr12_11 Forward Primer
tgcccaaccaagaagaaaac

SEQ ID NO: 13163 - DNA, 20 bp, Artificial Sequence
  Chr12_11 Forward Primer
caccttccaccagaaggaga

SEQ ID NO: 13164 - DNA, 20 bp, Artificial Sequence
  Chr12_11 Forward Primer
cctgaacgacgtgggatact

SEQ ID NO: 13165 - DNA, 20 bp, Artificial Sequence
  Chr12_11 Forward Primer
cccgtgggtatttaagggtt

SEQ ID NO: 13166 - DNA, 20 bp, Artificial Sequence
  Chr12_11 Forward Primer
atggtcattcccagcttcac

SEQ ID NO: 13167 - DNA, 20 bp, Artificial Sequence
  Chr12_11 Forward Primer
ctggggagggaagagaaaag

SEQ ID NO: 13168 - DNA, 20 bp, Artificial Sequence
  Chr12_11 Forward Primer
tctttccccctcctcaaact

SEQ ID NO: 13169 - DNA, 19 bp, Artificial Sequence
  Chr12_11 Reverse Primer
attcttccaggaatggccc

SEQ ID NO: 13170 - DNA, 20 bp, Artificial Sequence
  Chr12_11 Reverse Primer
ccttcctttctccagtccaa

SEQ ID NO: 13171 - DNA, 20 bp, Artificial Sequence
  Chr12_11 Reverse Primer
tcctattggtcctccttccc

SEQ ID NO: 13172 - DNA, 20 bp, Artificial Sequence
  Chr12_11 Reverse Primer
atatgaggtgggggtacgtg

SEQ ID NO: 13173 - DNA, 20 bp, Artificial Sequence
  Chr12_11 Reverse Primer
gaagtcaagaaagggcctca

SEQ ID NO: 13174 - DNA, 20 bp, Artificial Sequence
  Chr12_11 Reverse Primer
gttcccctcctgaccatctt

SEQ ID NO: 13175 - DNA, 20 bp, Artificial Sequence
  Chr12_11 Reverse Primer
cctgccttgctaacttttgg

SEQ ID NO: 13176 - DNA, 21 bp, Artificial Sequence
  Chr12_11 Reverse Primer
gcattctaattgcagcattcc

SEQ ID NO: 13177 - DNA, 20 bp, Artificial Sequence
  Chr12_11 Reverse Primer
atctttttcctgccaaagca

SEQ ID NO: 13178 - DNA, 20 bp, Artificial Sequence
  Chr12_11 Reverse Primer
ctctgcacactgccatgtct

SEQ ID NO: 13179 - DNA, 20 bp, Artificial Sequence
  Chr12_11 Reverse Primer
ttatgtggggcaatgtatgc

SEQ ID NO: 13180 - DNA, 20 bp, Artificial Sequence
  Chr12_11 Reverse Primer
caccgcagagaatgagacaa

SEQ ID NO: 13181 - DNA, 20 bp, Artificial Sequence
  Chr12_11 Reverse Primer
actgaagggttgatgcttgg

SEQ ID NO: 13182 - DNA, 20 bp, Artificial Sequence
  Chr12_11 Reverse Primer
ccctcattccatgaagcagt

SEQ ID NO: 13183 - DNA, 21 bp, Artificial Sequence
  Chr12_11 Reverse Primer
gcgtaaacttttctcgaagca

SEQ ID NO: 13184 - DNA, 20 bp, Artificial Sequence
  Chr12_11 Reverse Primer
cagcttgtgtcagggtttga

SEQ ID NO: 13185 - DNA, 20 bp, Artificial Sequence
  Chr12_11 Reverse Primer
gtccacaaaccttctcacgg

SEQ ID NO: 13186 - DNA, 20 bp, Artificial Sequence
  Chr12_11 Reverse Primer
gaggcagggacagacatgat

SEQ ID NO: 13187 - DNA, 20 bp, Artificial Sequence
  Chr12_11 Reverse Primer
tgggctccagtttaccaatc

SEQ ID NO: 13188 - DNA, 21 bp, Artificial Sequence
  Chr12_11 Reverse Primer
tgggcaaatcactttgtaagc

SEQ ID NO: 13189 - DNA, 20 bp, Artificial Sequence
  Chr12_11 Reverse Primer
tggctctgtcctgggttaaa

SEQ ID NO: 13190 - DNA, 20 bp, Artificial Sequence
  Chr12_11 Reverse Primer
tgatctatttggccagagcc

SEQ ID NO: 13191 - DNA, 20 bp, Artificial Sequence
  Chr12_11 Reverse Primer
ttccagaagttgctttgtcg

SEQ ID NO: 13192 - DNA, 20 bp, Artificial Sequence
  Chr12_11 Reverse Primer
aaggagtgcaagggtgtgag

SEQ ID NO: 13193 - DNA, 20 bp, Artificial Sequence
  Chr12_11 Reverse Primer
gtgcaaaatcctggagcaat

SEQ ID NO: 13194 - DNA, 20 bp, Artificial Sequence
  Chr12_11 Reverse Primer
tggaatgcttaaggccaaat

SEQ ID NO: 13195 - DNA, 20 bp, Artificial Sequence
  Chr12_11 Reverse Primer
tggccaccatctttgtgtaa

SEQ ID NO: 13196 - DNA, 20 bp, Artificial Sequence
  Chr12_11 Reverse Primer
caagtcttttggcttccagc

SEQ ID NO: 13197 - DNA, 20 bp, Artificial Sequence
  Chr12_11 Reverse Primer
aatccttgtgccaacctttg

SEQ ID NO: 13198 - DNA, 20 bp, Artificial Sequence
  Chr12_11 Reverse Primer
gaaccccaaagtatggcaag

SEQ ID NO: 13199 - DNA, 20 bp, Artificial Sequence
  Chr12_11 Reverse Primer
gataaaaacttcgggccctc

SEQ ID NO: 13200 - DNA, 20 bp, Artificial Sequence
  Chr12_11 Reverse Primer
atgtagctccttggcttcca

SEQ ID NO: 13201 - DNA, 20 bp, Artificial Sequence
  Chr12_11 Reverse Primer
agtggcaagctggtttcatc

SEQ ID NO: 13202 - DNA, 20 bp, Artificial Sequence
  Chr12_11 Reverse Primer
ggtttggaagatgagacgga

SEQ ID NO: 13203 - DNA, 20 bp, Artificial Sequence
  Chr12_11 Reverse Primer
cttgcacagaggcagacttg

SEQ ID NO: 13204 - DNA, 20 bp, Artificial Sequence
  Chr12_11 Reverse Primer
ccctgacacagactgctcct

SEQ ID NO: 13205 - DNA, 20 bp, Artificial Sequence
  Chr12_11 Reverse Primer
atttgtctttccatcgcagc

SEQ ID NO: 13206 - DNA, 20 bp, Artificial Sequence
  Chr12_11 Reverse Primer
aaggtcattctctctgggca

SEQ ID NO: 13207 - DNA, 20 bp, Artificial Sequence
  Chr12_11 Reverse Primer
tgaaagcacctgaagacgtg

SEQ ID NO: 13208 - DNA, 20 bp, Artificial Sequence
  Chr12_11 Reverse Primer
gctgcctgcgatgtagtgta

SEQ ID NO: 13209 - DNA, 20 bp, Artificial Sequence
  Chr12_11 Reverse Primer
gcattttgaatgcagtggtg

SEQ ID NO: 13210 - DNA, 24 bp, Artificial Sequence
  Chr12_11 Reverse Primer
aagtgacctctgtggctattaagg

SEQ ID NO: 13211 - DNA, 20 bp, Artificial Sequence
  Chr12_11 Reverse Primer
gctctggctatgtgagaggg

SEQ ID NO: 13212 - DNA, 20 bp, Artificial Sequence
  Chr12_11 Reverse Primer
ggtaagccacttcacctcca

SEQ ID NO: 13213 - DNA, 20 bp, Artificial Sequence
  Chr12_11 Reverse Primer
atcgacctgttgacccaatg

SEQ ID NO: 13214 - DNA, 20 bp, Artificial Sequence
  Chr12_11 Reverse Primer
acaacacccttctggaagca

SEQ ID NO: 13215 - DNA, 24 bp, Artificial Sequence
  Chr12_11 Reverse Primer
caaacaaaattagagcaattccaa

SEQ ID NO: 13216 - DNA, 21 bp, Artificial Sequence
  Chr12_11 Reverse Primer
gaggaagtctccatttatgcc

SEQ ID NO: 13217 - DNA, 20 bp, Artificial Sequence
  Chr12_11 Reverse Primer
ccattgattacccatggcac

SEQ ID NO: 13218 - DNA, 25 bp, Artificial Sequence
  Chr12_11 Reverse Primer
tcacttgttcttttgcttgtatttt

SEQ ID NO: 13219 - DNA, 24 bp, Artificial Sequence
  Chr12_11 Reverse Primer
tgagaattcatcattttgaaggaa

SEQ ID NO: 13220 - DNA, 20 bp, Artificial Sequence
  Chr12_11 Reverse Primer
cgaattgggacttctcagga

SEQ ID NO: 13221 - DNA, 20 bp, Artificial Sequence
  Chr12_11 Reverse Primer
aatgggagattccaagaggg

SEQ ID NO: 13222 - DNA, 20 bp, Artificial Sequence
  Chr12_11 Reverse Primer
ttacacctgtggggagcttg

SEQ ID NO: 13223 - DNA, 20 bp, Artificial Sequence
  Chr12_11 Reverse Primer
ttcccagagaaaaggttccc

SEQ ID NO: 13224 - DNA, 20 bp, Artificial Sequence
  Chr12_11 Reverse Primer
agtccacaaaacggctcata

SEQ ID NO: 13225 - DNA, 20 bp, Artificial Sequence
  Chr12_11 Reverse Primer
ccatgacagaaagctcgtga

SEQ ID NO: 13226 - DNA, 20 bp, Artificial Sequence
  Chr12_11 Reverse Primer
ttacgttgagtggagggagg

SEQ ID NO: 13227 - DNA, 20 bp, Artificial Sequence
  Chr12_11 Reverse Primer
gctgaggaaagtgtagccca

SEQ ID NO: 13228 - DNA, 20 bp, Artificial Sequence
  Chr12_11 Reverse Primer
tggagacacttggtcacaca

SEQ ID NO: 13229 - DNA, 20 bp, Artificial Sequence
  Chr12_11 Reverse Primer
atgagccagcaggtagtggt

SEQ ID NO: 13230 - DNA, 20 bp, Artificial Sequence
  Chr12_11 Reverse Primer
atgatgatccttcagcccag

SEQ ID NO: 13231 - DNA, 20 bp, Artificial Sequence
  Chr12_11 Reverse Primer
tcttagagcagtgcccatca

SEQ ID NO: 13232 - DNA, 20 bp, Artificial Sequence
  Chr12_11 Reverse Primer
caaagtggtgtcccaagtca

SEQ ID NO: 13233 - DNA, 20 bp, Artificial Sequence
  Chr12_11 Reverse Primer
ggggaaagtgaagaaatcca

SEQ ID NO: 13234 - DNA, 22 bp, Artificial Sequence
  Chr12_11 Reverse Primer
ggaggggacagatacctaaaca

SEQ ID NO: 13235 - DNA, 20 bp, Artificial Sequence
  Chr12_11 Reverse Primer
gcctgaggattagggggtta

SEQ ID NO: 13236 - DNA, 20 bp, Artificial Sequence
  Chr12_11 Reverse Primer
attggccaacgtaagtcagg

SEQ ID NO: 13237 - DNA, 20 bp, Artificial Sequence
  Chr12_11 Reverse Primer
ttaaaccccatggctgctac

SEQ ID NO: 13238 - DNA, 20 bp, Artificial Sequence
  Chr12_11 Reverse Primer
agactctgggattggactgc

SEQ ID NO: 13239 - DNA, 20 bp, Artificial Sequence
  Chr12_11 Reverse Primer
tctctcctcacatgttgccc

SEQ ID NO: 13240 - DNA, 20 bp, Artificial Sequence
  Chr12_11 Reverse Primer
caagctgcaatggaatcaga

SEQ ID NO: 13241 - DNA, 24 bp, Artificial Sequence
  Chr12_11 Reverse Primer
aacatgttttaaccctcaggatct

SEQ ID NO: 13242 - DNA, 20 bp, Artificial Sequence
  Chr12_11 Reverse Primer
aggcaggaggggagactaaa

SEQ ID NO: 13243 - DNA, 20 bp, Artificial Sequence
  Chr12_11 Reverse Primer
cctgaggccagagatacagg

SEQ ID NO: 13244 - DNA, 20 bp, Artificial Sequence
  Chr12_11 Reverse Primer
ttgggcgtctgatttttacc

SEQ ID NO: 13245 - DNA, 22 bp, Artificial Sequence
  Chr12_11 Reverse Primer
tttctcatctttagatgggggt

SEQ ID NO: 13246 - DNA, 20 bp, Artificial Sequence
  Chr12_11 Reverse Primer
ggaaattccatttcttgcca

SEQ ID NO: 13247 - DNA, 20 bp, Artificial Sequence
  Chr12_11 Reverse Primer
gggcactgaggtgaggatag

SEQ ID NO: 13248 - DNA, 20 bp, Artificial Sequence
  Chr12_11 Reverse Primer
gcaaacgtggtgattgctta

SEQ ID NO: 13249 - DNA, 21 bp, Artificial Sequence
  Chr12_11 Reverse Primer
ccctgtttatgaattggggat

SEQ ID NO: 13250 - DNA, 20 bp, Artificial Sequence
  Chr12_11 Reverse Primer
agctgacaggcagatcccta

SEQ ID NO: 13251 - DNA, 20 bp, Artificial Sequence
  Chr12_11 Reverse Primer
tgtttccgaggaaaaacaca

SEQ ID NO: 13252 - DNA, 20 bp, Artificial Sequence
  Chr12_11 Reverse Primer
ccaactgccagctcctaagt

SEQ ID NO: 13253 - DNA, 20 bp, Artificial Sequence
  Chr12_11 Reverse Primer
tgcaaatcaaggagagtgga

SEQ ID NO: 13254 - DNA, 20 bp, Artificial Sequence
  Chr12_11 Reverse Primer
ggcatgtgccacagtctaca

SEQ ID NO: 13255 - DNA, 20 bp, Artificial Sequence
  Chr12_11 Reverse Primer
acggatgctttgtctcaggt

SEQ ID NO: 13256 - DNA, 20 bp, Artificial Sequence
  Chr12_11 Reverse Primer
tggtcaaagactgctcttgc

SEQ ID NO: 13257 - DNA, 20 bp, Artificial Sequence
  Chr12_11 Reverse Primer
aaaaagacaccatttgggga

SEQ ID NO: 13258 - DNA, 20 bp, Artificial Sequence
  Chr12_11 Reverse Primer
tatgtgtgaggaggggtgtg

SEQ ID NO: 13259 - DNA, 20 bp, Artificial Sequence
  Chr12_11 Reverse Primer
tcgaggaaagaggttagcca

SEQ ID NO: 13260 - DNA, 20 bp, Artificial Sequence
  Chr12_11 Reverse Primer
cagccttgaactaagcaccc

SEQ ID NO: 13261 - DNA, 20 bp, Artificial Sequence
  Chr12_11 Reverse Primer
aatggcactgacggagaaac

SEQ ID NO: 13262 - DNA, 20 bp, Artificial Sequence
  Chr12_11 Reverse Primer
agctggaaccagaaacatgc

SEQ ID NO: 13263 - DNA, 20 bp, Artificial Sequence
  Chr12_11 Reverse Primer
ttcgggcttaattccacaag

SEQ ID NO: 13264 - DNA, 20 bp, Artificial Sequence
  Chr12_11 Reverse Primer
gcacactgcagcctacagaa

SEQ ID NO: 13265 - DNA, 20 bp, Artificial Sequence
  Chr12_12 Forward Primer
aagagcatgggctctgacat

SEQ ID NO: 13266 - DNA, 20 bp, Artificial Sequence
  Chr12_12 Forward Primer
tggaggaagtgaccttttgg

SEQ ID NO: 13267 - DNA, 20 bp, Artificial Sequence
  Chr12_12 Forward Primer
ccccctgttgtcagacactt

SEQ ID NO: 13268 - DNA, 20 bp, Artificial Sequence
  Chr12_12 Forward Primer
ctgagagatgggctctcacc

SEQ ID NO: 13269 - DNA, 20 bp, Artificial Sequence
  Chr12_12 Forward Primer
cagggcattgagagactggt

SEQ ID NO: 13270 - DNA, 20 bp, Artificial Sequence
  Chr12_12 Forward Primer
gaaaacgtgggactcaaagc

SEQ ID NO: 13271 - DNA, 20 bp, Artificial Sequence
  Chr12_12 Forward Primer
gacttccccatctccaatca

SEQ ID NO: 13272 - DNA, 20 bp, Artificial Sequence
  Chr12_12 Forward Primer
attcagtccagctcaggtcc

SEQ ID NO: 13273 - DNA, 20 bp, Artificial Sequence
  Chr12_12 Forward Primer
aatttgggatggtgagatgc

SEQ ID NO: 13274 - DNA, 20 bp, Artificial Sequence
  Chr12_12 Forward Primer
cccagaggaatgatttcagg

SEQ ID NO: 13275 - DNA, 20 bp, Artificial Sequence
  Chr12_12 Forward Primer
tcattatgccgtctctgctg

SEQ ID NO: 13276 - DNA, 20 bp, Artificial Sequence
  Chr12_12 Forward Primer
ctgaggagactgaggttcgg

SEQ ID NO: 13277 - DNA, 20 bp, Artificial Sequence
  Chr12_12 Forward Primer
gagttgtgctcctggaaagc

SEQ ID NO: 13278 - DNA, 20 bp, Artificial Sequence
  Chr12_12 Forward Primer
atagtaagcacctgccccct

SEQ ID NO: 13279 - DNA, 20 bp, Artificial Sequence
  Chr12_12 Forward Primer
tcatttcccatcctctttgg

SEQ ID NO: 13280 - DNA, 19 bp, Artificial Sequence
  Chr12_12 Forward Primer
gacagaagaggggtttggc

SEQ ID NO: 13281 - DNA, 20 bp, Artificial Sequence
  Chr12_12 Forward Primer
gaaaccagagtggagggtca

SEQ ID NO: 13282 - DNA, 20 bp, Artificial Sequence
  Chr12_12 Forward Primer
ggtatgcagcaggtggtagc

SEQ ID NO: 13283 - DNA, 20 bp, Artificial Sequence
  Chr12_12 Forward Primer
tcccgagtttctccatctgt

SEQ ID NO: 13284 - DNA, 20 bp, Artificial Sequence
  Chr12_12 Forward Primer
agatttcctggcctttttcc

SEQ ID NO: 13285 - DNA, 20 bp, Artificial Sequence
  Chr12_12 Forward Primer
tagctgggctgtcaattcct

SEQ ID NO: 13286 - DNA, 20 bp, Artificial Sequence
  Chr12_12 Forward Primer
tgaggggcaaaaccacttag

SEQ ID NO: 13287 - DNA, 20 bp, Artificial Sequence
  Chr12_12 Forward Primer
cccccttctctgctttaacc

SEQ ID NO: 13288 - DNA, 20 bp, Artificial Sequence
  Chr12_12 Forward Primer
tgtctacgtgtgtgcactgg

SEQ ID NO: 13289 - DNA, 20 bp, Artificial Sequence
  Chr12_12 Forward Primer
ggaggagaagggtatcgagg

SEQ ID NO: 13290 - DNA, 20 bp, Artificial Sequence
  Chr12_12 Forward Primer
gtggtgatttttgcgaggtt

SEQ ID NO: 13291 - DNA, 20 bp, Artificial Sequence
  Chr12_12 Forward Primer
gcttgttcaaattctgggga

SEQ ID NO: 13292 - DNA, 20 bp, Artificial Sequence
  Chr12_12 Forward Primer
agagattggcaagcctgaaa

SEQ ID NO: 13293 - DNA, 20 bp, Artificial Sequence
  Chr12_12 Forward Primer
attatggagaggtttggggg

SEQ ID NO: 13294 - DNA, 20 bp, Artificial Sequence
  Chr12_12 Forward Primer
ttatggcctcagatgcacag

SEQ ID NO: 13295 - DNA, 20 bp, Artificial Sequence
  Chr12_12 Forward Primer
caggaagcttagccatggag

SEQ ID NO: 13296 - DNA, 20 bp, Artificial Sequence
  Chr12_12 Forward Primer
acatggacctgtcttctgcc

SEQ ID NO: 13297 - DNA, 20 bp, Artificial Sequence
  Chr12_12 Forward Primer
gaaatcacccctgaccaaaa

SEQ ID NO: 13298 - DNA, 20 bp, Artificial Sequence
  Chr12_12 Forward Primer
aggaggagaagcactggtga

SEQ ID NO: 13299 - DNA, 20 bp, Artificial Sequence
  Chr12_12 Forward Primer
ggcctgcatacagtaggtgc

SEQ ID NO: 13300 - DNA, 20 bp, Artificial Sequence
  Chr12_12 Forward Primer
agacacgatcctttttggga

SEQ ID NO: 13301 - DNA, 20 bp, Artificial Sequence
  Chr12_12 Forward Primer
gaagcaggcttggtttcttg

SEQ ID NO: 13302 - DNA, 20 bp, Artificial Sequence
  Chr12_12 Forward Primer
aaaagagggaaggcagcagt

SEQ ID NO: 13303 - DNA, 20 bp, Artificial Sequence
  Chr12_12 Forward Primer
aagttcgttgggaggctttt

SEQ ID NO: 13304 - DNA, 20 bp, Artificial Sequence
  Chr12_12 Forward Primer
agactcagcagtgagggagc

SEQ ID NO: 13305 - DNA, 20 bp, Artificial Sequence
  Chr12_12 Forward Primer
cagggtagccaaggagtctg

SEQ ID NO: 13306 - DNA, 20 bp, Artificial Sequence
  Chr12_12 Forward Primer
gagaaggccagagcaatcag

SEQ ID NO: 13307 - DNA, 20 bp, Artificial Sequence
  Chr12_12 Forward Primer
ggtgtctgcagcttcctctc

SEQ ID NO: 13308 - DNA, 20 bp, Artificial Sequence
  Chr12_12 Forward Primer
agctcccgagggagaaataa

SEQ ID NO: 13309 - DNA, 20 bp, Artificial Sequence
  Chr12_12 Forward Primer
ccattcccctccattcatag

SEQ ID NO: 13310 - DNA, 20 bp, Artificial Sequence
  Chr12_12 Forward Primer
gtgagtttccctccagcaac

SEQ ID NO: 13311 - DNA, 20 bp, Artificial Sequence
  Chr12_12 Forward Primer
tatagggggtatggtgcgag

SEQ ID NO: 13312 - DNA, 20 bp, Artificial Sequence
  Chr12_12 Forward Primer
ttggtgaaagcagaaaggct

SEQ ID NO: 13313 - DNA, 24 bp, Artificial Sequence
  Chr12_12 Forward Primer
tttgtttcgcaataactttttgaa

SEQ ID NO: 13314 - DNA, 20 bp, Artificial Sequence
  Chr12_12 Forward Primer
tggtgaatttggtggtctca

SEQ ID NO: 13315 - DNA, 20 bp, Artificial Sequence
  Chr12_12 Forward Primer
ggatgtatgtgtgcaccagg

SEQ ID NO: 13316 - DNA, 22 bp, Artificial Sequence
  Chr12_12 Forward Primer
tttcatagcagccaatacgaac

SEQ ID NO: 13317 - DNA, 20 bp, Artificial Sequence
  Chr12_12 Forward Primer
aaaagattggtgcccctttt

SEQ ID NO: 13318 - DNA, 20 bp, Artificial Sequence
  Chr12_12 Forward Primer
cattctgggaggaggatgaa

SEQ ID NO: 13319 - DNA, 20 bp, Artificial Sequence
  Chr12_12 Forward Primer
ctgaattgctaggtgggacc

SEQ ID NO: 13320 - DNA, 21 bp, Artificial Sequence
  Chr12_12 Forward Primer
tgttctttcagcacccataca

SEQ ID NO: 13321 - DNA, 20 bp, Artificial Sequence
  Chr12_12 Forward Primer
atgtgagggtgagatgaggc

SEQ ID NO: 13322 - DNA, 20 bp, Artificial Sequence
  Chr12_12 Forward Primer
cctccactcctcttcacagc

SEQ ID NO: 13323 - DNA, 20 bp, Artificial Sequence
  Chr12_12 Forward Primer
accaaagcttggcactttgt

SEQ ID NO: 13324 - DNA, 20 bp, Artificial Sequence
  Chr12_12 Forward Primer
ttagaagggatgcaggatgg

SEQ ID NO: 13325 - DNA, 20 bp, Artificial Sequence
  Chr12_12 Forward Primer
taagtgctcaggggcagtct

SEQ ID NO: 13326 - DNA, 20 bp, Artificial Sequence
  Chr12_12 Forward Primer
cgggtatgaatttgtgcctt

SEQ ID NO: 13327 - DNA, 20 bp, Artificial Sequence
  Chr12_12 Forward Primer
ctgcctccaaggtgatccta

SEQ ID NO: 13328 - DNA, 20 bp, Artificial Sequence
  Chr12_12 Forward Primer
tgtggagatgactgtccctg

SEQ ID NO: 13329 - DNA, 20 bp, Artificial Sequence
  Chr12_12 Forward Primer
tttccagacaaggaaaggga

SEQ ID NO: 13330 - DNA, 20 bp, Artificial Sequence
  Chr12_12 Forward Primer
tatccccagatccctcaatg

SEQ ID NO: 13331 - DNA, 20 bp, Artificial Sequence
  Chr12_12 Forward Primer
ataaacccatttgctgctcg

SEQ ID NO: 13332 - DNA, 20 bp, Artificial Sequence
  Chr12_12 Forward Primer
gcccaaaaacaacccctaag

SEQ ID NO: 13333 - DNA, 22 bp, Artificial Sequence
  Chr12_12 Forward Primer
tcatcatctcatcgttctgctt

SEQ ID NO: 13334 - DNA, 20 bp, Artificial Sequence
  Chr12_12 Forward Primer
tgaggccagagtcatgtgag

SEQ ID NO: 13335 - DNA, 23 bp, Artificial Sequence
  Chr12_12 Forward Primer
agaaagaatggattgaagaaggc

SEQ ID NO: 13336 - DNA, 20 bp, Artificial Sequence
  Chr12_12 Forward Primer
ttcccctctctccctctctc

SEQ ID NO: 13337 - DNA, 20 bp, Artificial Sequence
  Chr12_12 Forward Primer
aggggcaagaagaggagaag

SEQ ID NO: 13338 - DNA, 20 bp, Artificial Sequence
  Chr12_12 Forward Primer
ctggactgtgtgaggcagaa

SEQ ID NO: 13339 - DNA, 20 bp, Artificial Sequence
  Chr12_12 Forward Primer
gtgtgcacgagtgtgtaggg

SEQ ID NO: 13340 - DNA, 20 bp, Artificial Sequence
  Chr12_12 Forward Primer
ttcaggaaagctcatcaccc

SEQ ID NO: 13341 - DNA, 20 bp, Artificial Sequence
  Chr12_12 Forward Primer
ttccttcctggtgatcttgg

SEQ ID NO: 13342 - DNA, 20 bp, Artificial Sequence
  Chr12_12 Forward Primer
agcaggatggaggatgaatg

SEQ ID NO: 13343 - DNA, 20 bp, Artificial Sequence
  Chr12_12 Forward Primer
cttccgtggcttgatgagat

SEQ ID NO: 13344 - DNA, 20 bp, Artificial Sequence
  Chr12_12 Forward Primer
gccaggttaacagcatgaca

SEQ ID NO: 13345 - DNA, 18 bp, Artificial Sequence
  Chr12_12 Forward Primer
ctctgccctgcctccagt

SEQ ID NO: 13346 - DNA, 20 bp, Artificial Sequence
  Chr12_12 Forward Primer
taggttgtgctgtgctgacc

SEQ ID NO: 13347 - DNA, 21 bp, Artificial Sequence
  Chr12_12 Forward Primer
ctggtttcagaaaggctgaga

SEQ ID NO: 13348 - DNA, 20 bp, Artificial Sequence
  Chr12_12 Forward Primer
accccaaacccataccctta

SEQ ID NO: 13349 - DNA, 20 bp, Artificial Sequence
  Chr12_12 Forward Primer
cctttatcctcacacacccc

SEQ ID NO: 13350 - DNA, 20 bp, Artificial Sequence
  Chr12_12 Forward Primer
gccagctctctcatcctgac

SEQ ID NO: 13351 - DNA, 20 bp, Artificial Sequence
  Chr12_12 Forward Primer
gggtggagaggggacatatt

SEQ ID NO: 13352 - DNA, 20 bp, Artificial Sequence
  Chr12_12 Forward Primer
tccttgaaccaatcacagca

SEQ ID NO: 13353 - DNA, 20 bp, Artificial Sequence
  Chr12_12 Forward Primer
tcttctactgtcccgttggc

SEQ ID NO: 13354 - DNA, 20 bp, Artificial Sequence
  Chr12_12 Forward Primer
atttggagcaccgtgaaatc

SEQ ID NO: 13355 - DNA, 20 bp, Artificial Sequence
  Chr12_12 Forward Primer
tccttaatgggtgtttggga

SEQ ID NO: 13356 - DNA, 20 bp, Artificial Sequence
  Chr12_12 Forward Primer
ggcaggcaccatctgttatt

SEQ ID NO: 13357 - DNA, 20 bp, Artificial Sequence
  Chr12_12 Forward Primer
tgtcccaagtgtccttgtca

SEQ ID NO: 13358 - DNA, 20 bp, Artificial Sequence
  Chr12_12 Forward Primer
atttcccaagagaagctggc

SEQ ID NO: 13359 - DNA, 20 bp, Artificial Sequence
  Chr12_12 Forward Primer
aacttgtggctgcaggttct

SEQ ID NO: 13360 - DNA, 20 bp, Artificial Sequence
  Chr12_12 Forward Primer
aaaaccctggagattttggg

SEQ ID NO: 13361 - DNA, 20 bp, Artificial Sequence
  Chr12_12 Reverse Primer
ctccccagagtttgtgaagg

SEQ ID NO: 13362 - DNA, 20 bp, Artificial Sequence
  Chr12_12 Reverse Primer
cagtccctgggaagagagaa

SEQ ID NO: 13363 - DNA, 20 bp, Artificial Sequence
  Chr12_12 Reverse Primer
gaaactggcacagcctctct

SEQ ID NO: 13364 - DNA, 20 bp, Artificial Sequence
  Chr12_12 Reverse Primer
ctccagcactgactccaaca

SEQ ID NO: 13365 - DNA, 20 bp, Artificial Sequence
  Chr12_12 Reverse Primer
ccggccagtggagatataga

SEQ ID NO: 13366 - DNA, 20 bp, Artificial Sequence
  Chr12_12 Reverse Primer
gaagatcctctcaagcccct

SEQ ID NO: 13367 - DNA, 20 bp, Artificial Sequence
  Chr12_12 Reverse Primer
aggaacagcagcttgaggag

SEQ ID NO: 13368 - DNA, 20 bp, Artificial Sequence
  Chr12_12 Reverse Primer
gaccatagttcacggggttc

SEQ ID NO: 13369 - DNA, 20 bp, Artificial Sequence
  Chr12_12 Reverse Primer
tctccctgtgtccaccctac

SEQ ID NO: 13370 - DNA, 21 bp, Artificial Sequence
  Chr12_12 Reverse Primer
cacattgtgctgagatccaaa

SEQ ID NO: 13371 - DNA, 20 bp, Artificial Sequence
  Chr12_12 Reverse Primer
agcagccaggatgtttcact

SEQ ID NO: 13372 - DNA, 20 bp, Artificial Sequence
  Chr12_12 Reverse Primer
gtaggacttggcgaagcaag

SEQ ID NO: 13373 - DNA, 20 bp, Artificial Sequence
  Chr12_12 Reverse Primer
ccatgtgtgtgccctacaag

SEQ ID NO: 13374 - DNA, 20 bp, Artificial Sequence
  Chr12_12 Reverse Primer
tctcatcctcccaacaatcc

SEQ ID NO: 13375 - DNA, 20 bp, Artificial Sequence
  Chr12_12 Reverse Primer
agcagggagacacctcaaaa

SEQ ID NO: 13376 - DNA, 20 bp, Artificial Sequence
  Chr12_12 Reverse Primer
ttttgcatactgggcatctg

SEQ ID NO: 13377 - DNA, 20 bp, Artificial Sequence
  Chr12_12 Reverse Primer
ccatttgcagacaagaagca

SEQ ID NO: 13378 - DNA, 20 bp, Artificial Sequence
  Chr12_12 Reverse Primer
caagaagcccagggagaaat

SEQ ID NO: 13379 - DNA, 20 bp, Artificial Sequence
  Chr12_12 Reverse Primer
ttccttgctcaaggcttcac

SEQ ID NO: 13380 - DNA, 20 bp, Artificial Sequence
  Chr12_12 Reverse Primer
atcagaccattgagccttgg

SEQ ID NO: 13381 - DNA, 20 bp, Artificial Sequence
  Chr12_12 Reverse Primer
cccccttacaactctggaaa

SEQ ID NO: 13382 - DNA, 20 bp, Artificial Sequence
  Chr12_12 Reverse Primer
acgggacttctcgacatcac

SEQ ID NO: 13383 - DNA, 20 bp, Artificial Sequence
  Chr12_12 Reverse Primer
gtgatttatgtgtgcggtgc

SEQ ID NO: 13384 - DNA, 20 bp, Artificial Sequence
  Chr12_12 Reverse Primer
atatcacttaccgcgacgct

SEQ ID NO: 13385 - DNA, 20 bp, Artificial Sequence
  Chr12_12 Reverse Primer
cggctactttcaccagcttc

SEQ ID NO: 13386 - DNA, 20 bp, Artificial Sequence
  Chr12_12 Reverse Primer
aatctcccaagctagtgcca

SEQ ID NO: 13387 - DNA, 20 bp, Artificial Sequence
  Chr12_12 Reverse Primer
cccttttgatgggtagcaga

SEQ ID NO: 13388 - DNA, 20 bp, Artificial Sequence
  Chr12_12 Reverse Primer
aaggtcacccagcaagagaa

SEQ ID NO: 13389 - DNA, 20 bp, Artificial Sequence
  Chr12_12 Reverse Primer
ggaagtgacccagtggagag

SEQ ID NO: 13390 - DNA, 20 bp, Artificial Sequence
  Chr12_12 Reverse Primer
tcagaggtcctgaacttggg

SEQ ID NO: 13391 - DNA, 20 bp, Artificial Sequence
  Chr12_12 Reverse Primer
acaaagaaagcccaagagca

SEQ ID NO: 13392 - DNA, 20 bp, Artificial Sequence
  Chr12_12 Reverse Primer
ctgggtggcagctgaattat

SEQ ID NO: 13393 - DNA, 20 bp, Artificial Sequence
  Chr12_12 Reverse Primer
tttgcccatttcacagatga

SEQ ID NO: 13394 - DNA, 20 bp, Artificial Sequence
  Chr12_12 Reverse Primer
ccttggcccttaaggatctc

SEQ ID NO: 13395 - DNA, 20 bp, Artificial Sequence
  Chr12_12 Reverse Primer
ttattcccaatgcccatcat

SEQ ID NO: 13396 - DNA, 20 bp, Artificial Sequence
  Chr12_12 Reverse Primer
gcattaactcgctccaaagc

SEQ ID NO: 13397 - DNA, 20 bp, Artificial Sequence
  Chr12_12 Reverse Primer
gcgacatgctaaatccaggt

SEQ ID NO: 13398 - DNA, 20 bp, Artificial Sequence
  Chr12_12 Reverse Primer
taattgcagggggtggtaaa

SEQ ID NO: 13399 - DNA, 20 bp, Artificial Sequence
  Chr12_12 Reverse Primer
ggggtgggaaaagtaaggag

SEQ ID NO: 13400 - DNA, 20 bp, Artificial Sequence
  Chr12_12 Reverse Primer
tccactggctgctgttttta

SEQ ID NO: 13401 - DNA, 20 bp, Artificial Sequence
  Chr12_12 Reverse Primer
cccaaatgtcaccaccttct

SEQ ID NO: 13402 - DNA, 20 bp, Artificial Sequence
  Chr12_12 Reverse Primer
ttttagctagcgtggaacgg

SEQ ID NO: 13403 - DNA, 20 bp, Artificial Sequence
  Chr12_12 Reverse Primer
agcggcaggttctatctgaa

SEQ ID NO: 13404 - DNA, 20 bp, Artificial Sequence
  Chr12_12 Reverse Primer
atggctgtgtaccaggaagg

SEQ ID NO: 13405 - DNA, 20 bp, Artificial Sequence
  Chr12_12 Reverse Primer
ctgatgccttggagaaaagc

SEQ ID NO: 13406 - DNA, 20 bp, Artificial Sequence
  Chr12_12 Reverse Primer
gcatgcatggtgtctgatgt

SEQ ID NO: 13407 - DNA, 20 bp, Artificial Sequence
  Chr12_12 Reverse Primer
gggaatggacagaggtgatg

SEQ ID NO: 13408 - DNA, 20 bp, Artificial Sequence
  Chr12_12 Reverse Primer
taaccaattgggacaaaggc

SEQ ID NO: 13409 - DNA, 20 bp, Artificial Sequence
  Chr12_12 Reverse Primer
ttccagcctgtctgtgactg

SEQ ID NO: 13410 - DNA, 20 bp, Artificial Sequence
  Chr12_12 Reverse Primer
tggatggggctaaagaacag

SEQ ID NO: 13411 - DNA, 20 bp, Artificial Sequence
  Chr12_12 Reverse Primer
tgctgttattagcggcatcc

SEQ ID NO: 13412 - DNA, 20 bp, Artificial Sequence
  Chr12_12 Reverse Primer
ttctaggaaaactcggtcgg

SEQ ID NO: 13413 - DNA, 20 bp, Artificial Sequence
  Chr12_12 Reverse Primer
ggataggccttgagcatctg

SEQ ID NO: 13414 - DNA, 20 bp, Artificial Sequence
  Chr12_12 Reverse Primer
tttcttcagttgggctccag

SEQ ID NO: 13415 - DNA, 21 bp, Artificial Sequence
  Chr12_12 Reverse Primer
tccatttacatccctaatggg

SEQ ID NO: 13416 - DNA, 21 bp, Artificial Sequence
  Chr12_12 Reverse Primer
ttctcttttctcccaatgtgc

SEQ ID NO: 13417 - DNA, 20 bp, Artificial Sequence
  Chr12_12 Reverse Primer
tgggccagtttgaagttttc

SEQ ID NO: 13418 - DNA, 20 bp, Artificial Sequence
  Chr12_12 Reverse Primer
caagaccacagagcagcaga

SEQ ID NO: 13419 - DNA, 20 bp, Artificial Sequence
  Chr12_12 Reverse Primer
ggagaaggaggaggcagagt

SEQ ID NO: 13420 - DNA, 20 bp, Artificial Sequence
  Chr12_12 Reverse Primer
tattgaataagcctgccgct

SEQ ID NO: 13421 - DNA, 20 bp, Artificial Sequence
  Chr12_12 Reverse Primer
caaacccaggagaccaaatg

SEQ ID NO: 13422 - DNA, 20 bp, Artificial Sequence
  Chr12_12 Reverse Primer
ccccatccaaaccaactaaa

SEQ ID NO: 13423 - DNA, 20 bp, Artificial Sequence
  Chr12_12 Reverse Primer
ccaaacaacagccctcaaat

SEQ ID NO: 13424 - DNA, 20 bp, Artificial Sequence
  Chr12_12 Reverse Primer
gatgaaatgaggcatgcaga

SEQ ID NO: 13425 - DNA, 20 bp, Artificial Sequence
  Chr12_12 Reverse Primer
cctgaggcacttcactccat

SEQ ID NO: 13426 - DNA, 20 bp, Artificial Sequence
  Chr12_12 Reverse Primer
ttcattcagccctgatttcc

SEQ ID NO: 13427 - DNA, 20 bp, Artificial Sequence
  Chr12_12 Reverse Primer
cggtacatttcgacctggtt

SEQ ID NO: 13428 - DNA, 24 bp, Artificial Sequence
  Chr12_12 Reverse Primer
tcaaaaggcatttttacagtttca

SEQ ID NO: 13429 - DNA, 20 bp, Artificial Sequence
  Chr12_12 Reverse Primer
tggttaagttccccaatcca

SEQ ID NO: 13430 - DNA, 20 bp, Artificial Sequence
  Chr12_12 Reverse Primer
tggcttagccttcactggtt

SEQ ID NO: 13431 - DNA, 20 bp, Artificial Sequence
  Chr12_12 Reverse Primer
ctacaagctgggatccacca

SEQ ID NO: 13432 - DNA, 20 bp, Artificial Sequence
  Chr12_12 Reverse Primer
cctactgtgtgccagggatt

SEQ ID NO: 13433 - DNA, 20 bp, Artificial Sequence
  Chr12_12 Reverse Primer
aaatccaaggccacttcaga

SEQ ID NO: 13434 - DNA, 20 bp, Artificial Sequence
  Chr12_12 Reverse Primer
ggatgtagcagcacccactt

SEQ ID NO: 13435 - DNA, 20 bp, Artificial Sequence
  Chr12_12 Reverse Primer
ccacatatagggggcatttg

SEQ ID NO: 13436 - DNA, 20 bp, Artificial Sequence
  Chr12_12 Reverse Primer
ccagacctggaaccactgag

SEQ ID NO: 13437 - DNA, 20 bp, Artificial Sequence
  Chr12_12 Reverse Primer
gctcactatcctgccctgag

SEQ ID NO: 13438 - DNA, 20 bp, Artificial Sequence
  Chr12_12 Reverse Primer
tcatgctggtccagtgactc

SEQ ID NO: 13439 - DNA, 20 bp, Artificial Sequence
  Chr12_12 Reverse Primer
cagcactcaacacatgcaca

SEQ ID NO: 13440 - DNA, 20 bp, Artificial Sequence
  Chr12_12 Reverse Primer
cttcctgaggcgaatgtctc

SEQ ID NO: 13441 - DNA, 20 bp, Artificial Sequence
  Chr12_12 Reverse Primer
gcaccaaatgtttcacatgc

SEQ ID NO: 13442 - DNA, 20 bp, Artificial Sequence
  Chr12_12 Reverse Primer
ttcgaccaaagaacgtttcc

SEQ ID NO: 13443 - DNA, 20 bp, Artificial Sequence
  Chr12_12 Reverse Primer
gaacccacctcaaaatggaa

SEQ ID NO: 13444 - DNA, 20 bp, Artificial Sequence
  Chr12_12 Reverse Primer
gggatggatcctgggtagat

SEQ ID NO: 13445 - DNA, 20 bp, Artificial Sequence
  Chr12_12 Reverse Primer
cctctaaaaaggctgcgtgt

SEQ ID NO: 13446 - DNA, 20 bp, Artificial Sequence
  Chr12_12 Reverse Primer
ccttgaatccttccctcctc

SEQ ID NO: 13447 - DNA, 20 bp, Artificial Sequence
  Chr12_12 Reverse Primer
tttccattgggctgctaaac

SEQ ID NO: 13448 - DNA, 20 bp, Artificial Sequence
  Chr12_12 Reverse Primer
catttgcctacccagcattt

SEQ ID NO: 13449 - DNA, 20 bp, Artificial Sequence
  Chr12_12 Reverse Primer
gtaccctctttctcccccag

SEQ ID NO: 13450 - DNA, 20 bp, Artificial Sequence
  Chr12_12 Reverse Primer
gggtttgaaaatgaaggcaa

SEQ ID NO: 13451 - DNA, 20 bp, Artificial Sequence
  Chr12_12 Reverse Primer
ccactgctctgccacttaca

SEQ ID NO: 13452 - DNA, 20 bp, Artificial Sequence
  Chr12_12 Reverse Primer
ccgactaaggctgaaacgac

SEQ ID NO: 13453 - DNA, 20 bp, Artificial Sequence
  Chr12_12 Reverse Primer
gggagctgagatcagagtgg

SEQ ID NO: 13454 - DNA, 20 bp, Artificial Sequence
  Chr12_12 Reverse Primer
tttgatggggtggaaaatgt

SEQ ID NO: 13455 - DNA, 20 bp, Artificial Sequence
  Chr12_12 Reverse Primer
gtttctgagttgctgtggca

SEQ ID NO: 13456 - DNA, 21 bp, Artificial Sequence
  Chr12_12 Reverse Primer
agcactggatagctggatgaa

SEQ ID NO: 13457 - DNA, 20 bp, Artificial Sequence
  Chr12_13 Forward Primer
tgtgcattctcaaaatggga

SEQ ID NO: 13458 - DNA, 23 bp, Artificial Sequence
  Chr12_13 Forward Primer
ttgttactcttcattttgggagg

SEQ ID NO: 13459 - DNA, 20 bp, Artificial Sequence
  Chr12_13 Forward Primer
ctggccctctcttcacgtag

SEQ ID NO: 13460 - DNA, 20 bp, Artificial Sequence
  Chr12_13 Forward Primer
gggcataaacgtgcagaaat

SEQ ID NO: 13461 - DNA, 23 bp, Artificial Sequence
  Chr12_13 Forward Primer
gaaaattttattttgtgcttgcc

SEQ ID NO: 13462 - DNA, 20 bp, Artificial Sequence
  Chr12_13 Forward Primer
ccgctcccatgtgttttaat

SEQ ID NO: 13463 - DNA, 21 bp, Artificial Sequence
  Chr12_13 Forward Primer
tggaacctagtggaaacctgg

SEQ ID NO: 13464 - DNA, 24 bp, Artificial Sequence
  Chr12_13 Forward Primer
aaatgcattgctcttatattggaa

SEQ ID NO: 13465 - DNA, 23 bp, Artificial Sequence
  Chr12_13 Forward Primer
gatgtcttacggaagctttacca

SEQ ID NO: 13466 - DNA, 20 bp, Artificial Sequence
  Chr12_13 Forward Primer
ggagtggcctacactgcttc

SEQ ID NO: 13467 - DNA, 21 bp, Artificial Sequence
  Chr12_13 Forward Primer
ttggaaagacaacagtgggat

SEQ ID NO: 13468 - DNA, 20 bp, Artificial Sequence
  Chr12_13 Forward Primer
cgcatgaggattcacctttt

SEQ ID NO: 13469 - DNA, 20 bp, Artificial Sequence
  Chr12_13 Forward Primer
ctggcatttgtgaaacagga

SEQ ID NO: 13470 - DNA, 21 bp, Artificial Sequence
  Chr12_13 Forward Primer
tttccattcaaaatagacccg

SEQ ID NO: 13471 - DNA, 20 bp, Artificial Sequence
  Chr12_13 Forward Primer
ggcagtcctatgggaattga

SEQ ID NO: 13472 - DNA, 19 bp, Artificial Sequence
  Chr12_13 Forward Primer
acgcccagtgctcatttct

SEQ ID NO: 13473 - DNA, 20 bp, Artificial Sequence
  Chr12_13 Forward Primer
gagggcccattttctcactc

SEQ ID NO: 13474 - DNA, 26 bp, Artificial Sequence
  Chr12_13 Forward Primer
caaataaaacaaacaagagtgaaaaa

SEQ ID NO: 13475 - DNA, 20 bp, Artificial Sequence
  Chr12_13 Forward Primer
cagtggcagttcttggattg

SEQ ID NO: 13476 - DNA, 20 bp, Artificial Sequence
  Chr12_13 Forward Primer
ttgcttgtctcgatcccttt

SEQ ID NO: 13477 - DNA, 20 bp, Artificial Sequence
  Chr12_13 Forward Primer
catttggaagcctttggttt

SEQ ID NO: 13478 - DNA, 20 bp, Artificial Sequence
  Chr12_13 Forward Primer
aaatggttggaacaagcagc

SEQ ID NO: 13479 - DNA, 20 bp, Artificial Sequence
  Chr12_13 Forward Primer
ggcattggatttccttggta

SEQ ID NO: 13480 - DNA, 21 bp, Artificial Sequence
  Chr12_13 Forward Primer
gatgggacactgagcactacc

SEQ ID NO: 13481 - DNA, 20 bp, Artificial Sequence
  Chr12_13 Forward Primer
ttgcgagagttgatcacgtt

SEQ ID NO: 13482 - DNA, 20 bp, Artificial Sequence
  Chr12_13 Forward Primer
catgacttgcaagaggagga

SEQ ID NO: 13483 - DNA, 24 bp, Artificial Sequence
  Chr12_13 Forward Primer
tggcagttttgtatttttagacca

SEQ ID NO: 13484 - DNA, 20 bp, Artificial Sequence
  Chr12_13 Forward Primer
ccagggattgtagagaccgt

SEQ ID NO: 13485 - DNA, 20 bp, Artificial Sequence
  Chr12_13 Forward Primer
gagggctgttccttgtccat

SEQ ID NO: 13486 - DNA, 20 bp, Artificial Sequence
  Chr12_13 Forward Primer
ttgtttgctgtgtcccatag

SEQ ID NO: 13487 - DNA, 19 bp, Artificial Sequence
  Chr12_13 Forward Primer
ccggcccgtagtctgtatt

SEQ ID NO: 13488 - DNA, 21 bp, Artificial Sequence
  Chr12_13 Forward Primer
tggagtttttcaggtctaccc

SEQ ID NO: 13489 - DNA, 20 bp, Artificial Sequence
  Chr12_13 Forward Primer
gacaactctcaccgtacccg

SEQ ID NO: 13490 - DNA, 24 bp, Artificial Sequence
  Chr12_13 Forward Primer
tctgttttctacctcctgaaagaa

SEQ ID NO: 13491 - DNA, 20 bp, Artificial Sequence
  Chr12_13 Forward Primer
gtgcctgtgggactgaatct

SEQ ID NO: 13492 - DNA, 20 bp, Artificial Sequence
  Chr12_13 Forward Primer
cattgtggccttccttagaa

SEQ ID NO: 13493 - DNA, 20 bp, Artificial Sequence
  Chr12_13 Forward Primer
gaggccacttctctgttcca

SEQ ID NO: 13494 - DNA, 22 bp, Artificial Sequence
  Chr12_13 Forward Primer
ttgtgcctctagctggtaagtc

SEQ ID NO: 13495 - DNA, 24 bp, Artificial Sequence
  Chr12_13 Forward Primer
gcaacagaagaccctatctctaaa

SEQ ID NO: 13496 - DNA, 20 bp, Artificial Sequence
  Chr12_13 Forward Primer
attgaagaagcaggctgtcc

SEQ ID NO: 13497 - DNA, 20 bp, Artificial Sequence
  Chr12_13 Forward Primer
gcgctaacagaggaatttgg

SEQ ID NO: 13498 - DNA, 20 bp, Artificial Sequence
  Chr12_13 Forward Primer
actcgcttatgaaactgggc

SEQ ID NO: 13499 - DNA, 21 bp, Artificial Sequence
  Chr12_13 Forward Primer
cccacccctttctagcactat

SEQ ID NO: 13500 - DNA, 24 bp, Artificial Sequence
  Chr12_13 Forward Primer
tgttctgggtaaaaattttgtttg

SEQ ID NO: 13501 - DNA, 24 bp, Artificial Sequence
  Chr12_13 Forward Primer
ggacattaaacctaagcaaacaca

SEQ ID NO: 13502 - DNA, 21 bp, Artificial Sequence
  Chr12_13 Forward Primer
cgcttggtagatcttgacctg

SEQ ID NO: 13503 - DNA, 20 bp, Artificial Sequence
  Chr12_13 Forward Primer
tggtgacatactgttgcctg

SEQ ID NO: 13504 - DNA, 25 bp, Artificial Sequence
  Chr12_13 Forward Primer
gcattatacgaaaacctgaattacc

SEQ ID NO: 13505 - DNA, 20 bp, Artificial Sequence
  Chr12_13 Forward Primer
gggcattcgtcttggtaaac

SEQ ID NO: 13506 - DNA, 20 bp, Artificial Sequence
  Chr12_13 Forward Primer
atctcagaatgatggctggg

SEQ ID NO: 13507 - DNA, 21 bp, Artificial Sequence
  Chr12_13 Forward Primer
cttttgctcattcccaaactg

SEQ ID NO: 13508 - DNA, 20 bp, Artificial Sequence
  Chr12_13 Forward Primer
ctgcgcctgaacaagaattt

SEQ ID NO: 13509 - DNA, 20 bp, Artificial Sequence
  Chr12_13 Forward Primer
cgtggctgtcaccatctagt

SEQ ID NO: 13510 - DNA, 20 bp, Artificial Sequence
  Chr12_13 Forward Primer
actttgcatggaaatgcctg

SEQ ID NO: 13511 - DNA, 20 bp, Artificial Sequence
  Chr12_13 Forward Primer
atgaatcgggtcatctcagc

SEQ ID NO: 13512 - DNA, 23 bp, Artificial Sequence
  Chr12_13 Forward Primer
taaatcaaaacaagcaatttccc

SEQ ID NO: 13513 - DNA, 27 bp, Artificial Sequence
  Chr12_13 Forward Primer
tttttgtttttatacagttggatcctt

SEQ ID NO: 13514 - DNA, 20 bp, Artificial Sequence
  Chr12_13 Forward Primer
acctctcctgctgtcgaaga

SEQ ID NO: 13515 - DNA, 27 bp, Artificial Sequence
  Chr12_13 Forward Primer
caattcaaaagattatacaaagtgtcc

SEQ ID NO: 13516 - DNA, 21 bp, Artificial Sequence
  Chr12_13 Forward Primer
caagatggtctcaggaatgga

SEQ ID NO: 13517 - DNA, 20 bp, Artificial Sequence
  Chr12_13 Forward Primer
tctttggcacagcacagaac

SEQ ID NO: 13518 - DNA, 20 bp, Artificial Sequence
  Chr12_13 Forward Primer
tgcttcagccataaccttcc

SEQ ID NO: 13519 - DNA, 20 bp, Artificial Sequence
  Chr12_13 Forward Primer
cccaggatatccctgaaggt

SEQ ID NO: 13520 - DNA, 20 bp, Artificial Sequence
  Chr12_13 Forward Primer
ttaccttctcatgctgccct

SEQ ID NO: 13521 - DNA, 20 bp, Artificial Sequence
  Chr12_13 Forward Primer
atttggaggcacatgaggtc

SEQ ID NO: 13522 - DNA, 22 bp, Artificial Sequence
  Chr12_13 Forward Primer
ttgggtctgctaatgtttcttg

SEQ ID NO: 13523 - DNA, 24 bp, Artificial Sequence
  Chr12_13 Forward Primer
tttgctttatttactcaggcaatc

SEQ ID NO: 13524 - DNA, 21 bp, Artificial Sequence
  Chr12_13 Forward Primer
caagaagatgaagccctacga

SEQ ID NO: 13525 - DNA, 20 bp, Artificial Sequence
  Chr12_13 Forward Primer
ccatgctaaactgggttggt

SEQ ID NO: 13526 - DNA, 20 bp, Artificial Sequence
  Chr12_13 Forward Primer
gtggaaagacaaccccaaga

SEQ ID NO: 13527 - DNA, 20 bp, Artificial Sequence
  Chr12_13 Forward Primer
ggtcctgcataccaaacaca

SEQ ID NO: 13528 - DNA, 21 bp, Artificial Sequence
  Chr12_13 Forward Primer
ttgcaacatcaactacaaccg

SEQ ID NO: 13529 - DNA, 20 bp, Artificial Sequence
  Chr12_13 Forward Primer
ttgacagtttccactggctg

SEQ ID NO: 13530 - DNA, 20 bp, Artificial Sequence
  Chr12_13 Forward Primer
atggagccagtaggcaaatg

SEQ ID NO: 13531 - DNA, 20 bp, Artificial Sequence
  Chr12_13 Forward Primer
acagctttgaccctttccct

SEQ ID NO: 13532 - DNA, 22 bp, Artificial Sequence
  Chr12_13 Forward Primer
tcttctatttggctgacaagga

SEQ ID NO: 13533 - DNA, 23 bp, Artificial Sequence
  Chr12_13 Forward Primer
aacaaactggcctaatatttcca

SEQ ID NO: 13534 - DNA, 24 bp, Artificial Sequence
  Chr12_13 Forward Primer
tgctctgagacctttctactctcc

SEQ ID NO: 13535 - DNA, 20 bp, Artificial Sequence
  Chr12_13 Forward Primer
cctctgagtcagttggaggc

SEQ ID NO: 13536 - DNA, 20 bp, Artificial Sequence
  Chr12_13 Forward Primer
aagactcaatgccctcgact

SEQ ID NO: 13537 - DNA, 21 bp, Artificial Sequence
  Chr12_13 Forward Primer
tgaaattttccattttggtgg

SEQ ID NO: 13538 - DNA, 20 bp, Artificial Sequence
  Chr12_13 Forward Primer
tcagctcacatcacctcctg

SEQ ID NO: 13539 - DNA, 20 bp, Artificial Sequence
  Chr12_13 Forward Primer
agcatatgtcatgcaccagc

SEQ ID NO: 13540 - DNA, 20 bp, Artificial Sequence
  Chr12_13 Forward Primer
tgtgtgaagcttgtatgggg

SEQ ID NO: 13541 - DNA, 20 bp, Artificial Sequence
  Chr12_13 Forward Primer
tgggaagatgttgcatttga

SEQ ID NO: 13542 - DNA, 22 bp, Artificial Sequence
  Chr12_13 Forward Primer
ctcattccttgatgtcgttcag

SEQ ID NO: 13543 - DNA, 20 bp, Artificial Sequence
  Chr12_13 Forward Primer
gagcgtcttgttgactgctg

SEQ ID NO: 13544 - DNA, 22 bp, Artificial Sequence
  Chr12_13 Forward Primer
aaaggcttgatacctgtcattc

SEQ ID NO: 13545 - DNA, 20 bp, Artificial Sequence
  Chr12_13 Forward Primer
tgaacccccaaatcaagtgt

SEQ ID NO: 13546 - DNA, 20 bp, Artificial Sequence
  Chr12_13 Forward Primer
tgctccctgtgaaattctga

SEQ ID NO: 13547 - DNA, 20 bp, Artificial Sequence
  Chr12_13 Forward Primer
gtcttcagatctggacccca

SEQ ID NO: 13548 - DNA, 23 bp, Artificial Sequence
  Chr12_13 Forward Primer
cattttgctgtacattcttccaa

SEQ ID NO: 13549 - DNA, 22 bp, Artificial Sequence
  Chr12_13 Forward Primer
ccgcccattaataacttacagg

SEQ ID NO: 13550 - DNA, 21 bp, Artificial Sequence
  Chr12_13 Forward Primer
tcacttctgtgtttcttccca

SEQ ID NO: 13551 - DNA, 21 bp, Artificial Sequence
  Chr12_13 Forward Primer
gcaaaaagtttgctctctccc

SEQ ID NO: 13552 - DNA, 20 bp, Artificial Sequence
  Chr12_13 Forward Primer
aaaagggaagaagggctttg

SEQ ID NO: 13553 - DNA, 21 bp, Artificial Sequence
  Chr12_13 Reverse Primer
caaccatcaagctattctggc

SEQ ID NO: 13554 - DNA, 20 bp, Artificial Sequence
  Chr12_13 Reverse Primer
gctggaacttctttgcacct

SEQ ID NO: 13555 - DNA, 20 bp, Artificial Sequence
  Chr12_13 Reverse Primer
cagtgaattttgcaaacggt

SEQ ID NO: 13556 - DNA, 23 bp, Artificial Sequence
  Chr12_13 Reverse Primer
tttgagatttgtaattccttgcc

SEQ ID NO: 13557 - DNA, 20 bp, Artificial Sequence
  Chr12_13 Reverse Primer
tttggttcctgaagtgctcc

SEQ ID NO: 13558 - DNA, 21 bp, Artificial Sequence
  Chr12_13 Reverse Primer
gtgctaattcctgtttggacc

SEQ ID NO: 13559 - DNA, 22 bp, Artificial Sequence
  Chr12_13 Reverse Primer
acagcaatagtctccatctccc

SEQ ID NO: 13560 - DNA, 26 bp, Artificial Sequence
  Chr12_13 Reverse Primer
ctgagtcttcagacaatctagaaaaa

SEQ ID NO: 13561 - DNA, 23 bp, Artificial Sequence
  Chr12_13 Reverse Primer
acatctagtccaaactgaatggc

SEQ ID NO: 13562 - DNA, 20 bp, Artificial Sequence
  Chr12_13 Reverse Primer
ctgcttccttggcttccata

SEQ ID NO: 13563 - DNA, 22 bp, Artificial Sequence
  Chr12_13 Reverse Primer
tcccctcatttctttcacagat

SEQ ID NO: 13564 - DNA, 20 bp, Artificial Sequence
  Chr12_13 Reverse Primer
aagttgttgccattcggtct

SEQ ID NO: 13565 - DNA, 21 bp, Artificial Sequence
  Chr12_13 Reverse Primer
cacatagcggataggaggaaa

SEQ ID NO: 13566 - DNA, 21 bp, Artificial Sequence
  Chr12_13 Reverse Primer
ccatcataatcaacatcgcag

SEQ ID NO: 13567 - DNA, 20 bp, Artificial Sequence
  Chr12_13 Reverse Primer
cctgaatttttctggtccaa

SEQ ID NO: 13568 - DNA, 20 bp, Artificial Sequence
  Chr12_13 Reverse Primer
ttagcaactgcacctccaga

SEQ ID NO: 13569 - DNA, 21 bp, Artificial Sequence
  Chr12_13 Reverse Primer
caagagaaagagggaccaagg

SEQ ID NO: 13570 - DNA, 27 bp, Artificial Sequence
  Chr12_13 Reverse Primer
tcttcttcataaaggtaaaaacaaaaa

SEQ ID NO: 13571 - DNA, 20 bp, Artificial Sequence
  Chr12_13 Reverse Primer
tcacccagtcagacttgcac

SEQ ID NO: 13572 - DNA, 20 bp, Artificial Sequence
  Chr12_13 Reverse Primer
actgtatgcaatgtcacggc

SEQ ID NO: 13573 - DNA, 20 bp, Artificial Sequence
  Chr12_13 Reverse Primer
tccttcaggcacagtccttc

SEQ ID NO: 13574 - DNA, 20 bp, Artificial Sequence
  Chr12_13 Reverse Primer
ccaatcccaactcgtctgtt

SEQ ID NO: 13575 - DNA, 27 bp, Artificial Sequence
  Chr12_13 Reverse Primer
ttgaagttttaacacaaatcagaaaga

SEQ ID NO: 13576 - DNA, 20 bp, Artificial Sequence
  Chr12_13 Reverse Primer
gcacgtaagaggaaacctgc

SEQ ID NO: 13577 - DNA, 21 bp, Artificial Sequence
  Chr12_13 Reverse Primer
gatggagggaataagctctgg

SEQ ID NO: 13578 - DNA, 23 bp, Artificial Sequence
  Chr12_13 Reverse Primer
tgctcaagatggttagtagcaga

SEQ ID NO: 13579 - DNA, 20 bp, Artificial Sequence
  Chr12_13 Reverse Primer
tgatgtggactttgagctgc

SEQ ID NO: 13580 - DNA, 20 bp, Artificial Sequence
  Chr12_13 Reverse Primer
gatgcatgcaagtgaacagc

SEQ ID NO: 13581 - DNA, 25 bp, Artificial Sequence
  Chr12_13 Reverse Primer
gaaacataaatgaacgtcaactcaa

SEQ ID NO: 13582 - DNA, 20 bp, Artificial Sequence
  Chr12_13 Reverse Primer
ttgccccagaaatgaaagag

SEQ ID NO: 13583 - DNA, 24 bp, Artificial Sequence
  Chr12_13 Reverse Primer
aaaatggcctagagaacagaagtc

SEQ ID NO: 13584 - DNA, 20 bp, Artificial Sequence
  Chr12_13 Reverse Primer
cacggatgtcttcgctacag

SEQ ID NO: 13585 - DNA, 20 bp, Artificial Sequence
  Chr12_13 Reverse Primer
caatgagtgcgagacgctaa

SEQ ID NO: 13586 - DNA, 22 bp, Artificial Sequence
  Chr12_13 Reverse Primer
ccttcttctgcagattgtctgt

SEQ ID NO: 13587 - DNA, 20 bp, Artificial Sequence
  Chr12_13 Reverse Primer
agcatccctttgtgaaatgc

SEQ ID NO: 13588 - DNA, 20 bp, Artificial Sequence
  Chr12_13 Reverse Primer
tgaggattccacagtcatcc

SEQ ID NO: 13589 - DNA, 20 bp, Artificial Sequence
  Chr12_13 Reverse Primer
gaagcctaggtgccaaatca

SEQ ID NO: 13590 - DNA, 20 bp, Artificial Sequence
  Chr12_13 Reverse Primer
gcaccagcttagtcctagcc

SEQ ID NO: 13591 - DNA, 25 bp, Artificial Sequence
  Chr12_13 Reverse Primer
ccatttctccatttgaaagataaaa

SEQ ID NO: 13592 - DNA, 20 bp, Artificial Sequence
  Chr12_13 Reverse Primer
ccaaatgaaccaaccacaaa

SEQ ID NO: 13593 - DNA, 20 bp, Artificial Sequence
  Chr12_13 Reverse Primer
tccacctccctgaatctgag

SEQ ID NO: 13594 - DNA, 20 bp, Artificial Sequence
  Chr12_13 Reverse Primer
agggagcaaagaggaagcat

SEQ ID NO: 13595 - DNA, 23 bp, Artificial Sequence
  Chr12_13 Reverse Primer
aacagctttttctttcaattcca

SEQ ID NO: 13596 - DNA, 21 bp, Artificial Sequence
  Chr12_13 Reverse Primer
tcaggatacgacagtggacaa

SEQ ID NO: 13597 - DNA, 20 bp, Artificial Sequence
  Chr12_13 Reverse Primer
ttgttcacaaagggcagaaa

SEQ ID NO: 13598 - DNA, 20 bp, Artificial Sequence
  Chr12_13 Reverse Primer
gaacaggtggcaaaaccaac

SEQ ID NO: 13599 - DNA, 22 bp, Artificial Sequence
  Chr12_13 Reverse Primer
tgcaagaaaatcccttaacaca

SEQ ID NO: 13600 - DNA, 20 bp, Artificial Sequence
  Chr12_13 Reverse Primer
gagcccaccagagatattgc

SEQ ID NO: 13601 - DNA, 21 bp, Artificial Sequence
  Chr12_13 Reverse Primer
ggaaatgaggcaaaaagttcc

SEQ ID NO: 13602 - DNA, 20 bp, Artificial Sequence
  Chr12_13 Reverse Primer
tggtgagaaaatgttgcctg

SEQ ID NO: 13603 - DNA, 20 bp, Artificial Sequence
  Chr12_13 Reverse Primer
agcgatttctaggccttggt

SEQ ID NO: 13604 - DNA, 20 bp, Artificial Sequence
  Chr12_13 Reverse Primer
tcaactggcaacatatgcaa

SEQ ID NO: 13605 - DNA, 21 bp, Artificial Sequence
  Chr12_13 Reverse Primer
cctgcaccataaaacatcaca

SEQ ID NO: 13606 - DNA, 20 bp, Artificial Sequence
  Chr12_13 Reverse Primer
aaggaaccatctcaagggct

SEQ ID NO: 13607 - DNA, 21 bp, Artificial Sequence
  Chr12_13 Reverse Primer
aggttttcaaaaatctgggga

SEQ ID NO: 13608 - DNA, 20 bp, Artificial Sequence
  Chr12_13 Reverse Primer
ggcaggaccatgaaaaagat

SEQ ID NO: 13609 - DNA, 22 bp, Artificial Sequence
  Chr12_13 Reverse Primer
gggaattcaatggataatttgg

SEQ ID NO: 13610 - DNA, 22 bp, Artificial Sequence
  Chr12_13 Reverse Primer
tgaccaaaattcagaaacgatg

SEQ ID NO: 13611 - DNA, 19 bp, Artificial Sequence
  Chr12_13 Reverse Primer
gagaaaccactggtgccct

SEQ ID NO: 13612 - DNA, 20 bp, Artificial Sequence
  Chr12_13 Reverse Primer
ggcagctgatggcaaagtta

SEQ ID NO: 13613 - DNA, 24 bp, Artificial Sequence
  Chr12_13 Reverse Primer
caatgttttaatccattaccttca

SEQ ID NO: 13614 - DNA, 20 bp, Artificial Sequence
  Chr12_13 Reverse Primer
agcccactctgggttgacta

SEQ ID NO: 13615 - DNA, 20 bp, Artificial Sequence
  Chr12_13 Reverse Primer
ggcacaaggacaagttggaa

SEQ ID NO: 13616 - DNA, 20 bp, Artificial Sequence
  Chr12_13 Reverse Primer
cttcttcaacaaagcctcgg

SEQ ID NO: 13617 - DNA, 20 bp, Artificial Sequence
  Chr12_13 Reverse Primer
ggcctgtgctcttcaaaaac

SEQ ID NO: 13618 - DNA, 20 bp, Artificial Sequence
  Chr12_13 Reverse Primer
cctcaagttctgcctgaaaa

SEQ ID NO: 13619 - DNA, 25 bp, Artificial Sequence
  Chr12_13 Reverse Primer
aaacaaacattcatctctctgaaaa

SEQ ID NO: 13620 - DNA, 20 bp, Artificial Sequence
  Chr12_13 Reverse Primer
atcttggctggctctgatgt

SEQ ID NO: 13621 - DNA, 20 bp, Artificial Sequence
  Chr12_13 Reverse Primer
caccatgctcccttatccat

SEQ ID NO: 13622 - DNA, 20 bp, Artificial Sequence
  Chr12_13 Reverse Primer
taaatcgcttccctccaaga

SEQ ID NO: 13623 - DNA, 20 bp, Artificial Sequence
  Chr12_13 Reverse Primer
cgcttccccctttaaagaat

SEQ ID NO: 13624 - DNA, 21 bp, Artificial Sequence
  Chr12_13 Reverse Primer
ccagaactaaatggagcatgg

SEQ ID NO: 13625 - DNA, 20 bp, Artificial Sequence
  Chr12_13 Reverse Primer
gtcatattgccgttagggga

SEQ ID NO: 13626 - DNA, 20 bp, Artificial Sequence
  Chr12_13 Reverse Primer
ggcagactgcaaagaaaagc

SEQ ID NO: 13627 - DNA, 20 bp, Artificial Sequence
  Chr12_13 Reverse Primer
ttggagagttgaacacctgc

SEQ ID NO: 13628 - DNA, 20 bp, Artificial Sequence
  Chr12_13 Reverse Primer
tttccctttgccaaaatgtc

SEQ ID NO: 13629 - DNA, 20 bp, Artificial Sequence
  Chr12_13 Reverse Primer
tggtttttccacagaccctt

SEQ ID NO: 13630 - DNA, 20 bp, Artificial Sequence
  Chr12_13 Reverse Primer
catcctctgtctaccggaca

SEQ ID NO: 13631 - DNA, 20 bp, Artificial Sequence
  Chr12_13 Reverse Primer
cggccacaaaatatgcttct

SEQ ID NO: 13632 - DNA, 20 bp, Artificial Sequence
  Chr12_13 Reverse Primer
ggctagggaaccttccattt

SEQ ID NO: 13633 - DNA, 21 bp, Artificial Sequence
  Chr12_13 Reverse Primer
aggagctgactgcttaatcca

SEQ ID NO: 13634 - DNA, 20 bp, Artificial Sequence
  Chr12_13 Reverse Primer
aaaagatgaacaagccaggg

SEQ ID NO: 13635 - DNA, 20 bp, Artificial Sequence
  Chr12_13 Reverse Primer
taatgcaaaagccggaagtt

SEQ ID NO: 13636 - DNA, 20 bp, Artificial Sequence
  Chr12_13 Reverse Primer
ctgtccaagcctacatgggt

SEQ ID NO: 13637 - DNA, 20 bp, Artificial Sequence
  Chr12_13 Reverse Primer
gggcacccacacataaaatc

SEQ ID NO: 13638 - DNA, 20 bp, Artificial Sequence
  Chr12_13 Reverse Primer
gcccgtgttcatatgctctt

SEQ ID NO: 13639 - DNA, 20 bp, Artificial Sequence
  Chr12_13 Reverse Primer
gacaatcggaagcccaatta

SEQ ID NO: 13640 - DNA, 24 bp, Artificial Sequence
  Chr12_13 Reverse Primer
gctcagtgatattgttggtattca

SEQ ID NO: 13641 - DNA, 20 bp, Artificial Sequence
  Chr12_13 Reverse Primer
agcccacttcttccttctcc

SEQ ID NO: 13642 - DNA, 20 bp, Artificial Sequence
  Chr12_13 Reverse Primer
ggcagggctgagattagaac

SEQ ID NO: 13643 - DNA, 20 bp, Artificial Sequence
  Chr12_13 Reverse Primer
tgcccagccatacttctttt

SEQ ID NO: 13644 - DNA, 20 bp, Artificial Sequence
  Chr12_13 Reverse Primer
cctgatctggaccaaaggaa

SEQ ID NO: 13645 - DNA, 24 bp, Artificial Sequence
  Chr12_13 Reverse Primer
tcaaattgaaaatggtcagataaa

SEQ ID NO: 13646 - DNA, 20 bp, Artificial Sequence
  Chr12_13 Reverse Primer
ttatggggcaattatgctca

SEQ ID NO: 13647 - DNA, 20 bp, Artificial Sequence
  Chr12_13 Reverse Primer
tttatagccaatccctggca

SEQ ID NO: 13648 - DNA, 20 bp, Artificial Sequence
  Chr12_13 Reverse Primer
tttcttcttttggtggtggg

SEQ ID NO: 13649 - DNA, 20 bp, Artificial Sequence
  Chr13_1 Forward Primer
atgtttttctcccacgcagt

SEQ ID NO: 13650 - DNA, 24 bp, Artificial Sequence
  Chr13_1 Forward Primer
ttgtatggctagttaccccttaat

SEQ ID NO: 13651 - DNA, 20 bp, Artificial Sequence
  Chr13_1 Forward Primer
gcctgttataatcgagggca

SEQ ID NO: 13652 - DNA, 20 bp, Artificial Sequence
  Chr13_1 Forward Primer
ggggtcacactgggaataga

SEQ ID NO: 13653 - DNA, 20 bp, Artificial Sequence
  Chr13_1 Forward Primer
aagaaagaggggaaggtgga

SEQ ID NO: 13654 - DNA, 20 bp, Artificial Sequence
  Chr13_1 Forward Primer
acaggaaaggggaagaaagg

SEQ ID NO: 13655 - DNA, 20 bp, Artificial Sequence
  Chr13_1 Forward Primer
aacagtctttcgaggcagga

SEQ ID NO: 13656 - DNA, 20 bp, Artificial Sequence
  Chr13_1 Forward Primer
ccaatgcaaggaaggacact

SEQ ID NO: 13657 - DNA, 20 bp, Artificial Sequence
  Chr13_1 Forward Primer
ttaaagcgacagtcacacgc

SEQ ID NO: 13658 - DNA, 20 bp, Artificial Sequence
  Chr13_1 Forward Primer
tacccaactggtcgaggaac

SEQ ID NO: 13659 - DNA, 20 bp, Artificial Sequence
  Chr13_1 Forward Primer
cccgaaatctgcaaattcat

SEQ ID NO: 13660 - DNA, 20 bp, Artificial Sequence
  Chr13_1 Forward Primer
tttctttgtccctgactccc

SEQ ID NO: 13661 - DNA, 20 bp, Artificial Sequence
  Chr13_1 Forward Primer
cgagaagacgcctactggag

SEQ ID NO: 13662 - DNA, 20 bp, Artificial Sequence
  Chr13_1 Forward Primer
gggggagaggagttgatctt

SEQ ID NO: 13663 - DNA, 20 bp, Artificial Sequence
  Chr13_1 Forward Primer
actcagggtttcttcctccc

SEQ ID NO: 13664 - DNA, 20 bp, Artificial Sequence
  Chr13_1 Forward Primer
cccttgaaggattcatgctg

SEQ ID NO: 13665 - DNA, 20 bp, Artificial Sequence
  Chr13_1 Forward Primer
tgctaagagctggggatcta

SEQ ID NO: 13666 - DNA, 20 bp, Artificial Sequence
  Chr13_1 Forward Primer
tctgatggctcccttaggtg

SEQ ID NO: 13667 - DNA, 20 bp, Artificial Sequence
  Chr13_1 Forward Primer
acactgaaaggccccctact

SEQ ID NO: 13668 - DNA, 20 bp, Artificial Sequence
  Chr13_1 Forward Primer
attctcccctgtgagggtct

SEQ ID NO: 13669 - DNA, 20 bp, Artificial Sequence
  Chr13_1 Forward Primer
ttttcagcggagggtatttg

SEQ ID NO: 13670 - DNA, 20 bp, Artificial Sequence
  Chr13_1 Forward Primer
tgagtgaacccacctgacaa

SEQ ID NO: 13671 - DNA, 21 bp, Artificial Sequence
  Chr13_1 Forward Primer
tctccactcgctgcttaaaaa

SEQ ID NO: 13672 - DNA, 20 bp, Artificial Sequence
  Chr13_1 Forward Primer
cccttcgctttctctttgtg

SEQ ID NO: 13673 - DNA, 20 bp, Artificial Sequence
  Chr13_1 Forward Primer
gcgtgctattgttaaccgct

SEQ ID NO: 13674 - DNA, 20 bp, Artificial Sequence
  Chr13_1 Forward Primer
ggataggacgtttgccacat

SEQ ID NO: 13675 - DNA, 20 bp, Artificial Sequence
  Chr13_1 Forward Primer
aggggctaggggtagtgttg

SEQ ID NO: 13676 - DNA, 20 bp, Artificial Sequence
  Chr13_1 Forward Primer
gggagttcgtcctcacactc

SEQ ID NO: 13677 - DNA, 20 bp, Artificial Sequence
  Chr13_1 Forward Primer
taggtgggaccttgaaggag

SEQ ID NO: 13678 - DNA, 20 bp, Artificial Sequence
  Chr13_1 Forward Primer
tcagatgagcacccaaactg

SEQ ID NO: 13679 - DNA, 20 bp, Artificial Sequence
  Chr13_1 Forward Primer
tgcaggatctgagatggttg

SEQ ID NO: 13680 - DNA, 20 bp, Artificial Sequence
  Chr13_1 Forward Primer
agtgagtctggggcaatgag

SEQ ID NO: 13681 - DNA, 20 bp, Artificial Sequence
  Chr13_1 Forward Primer
tctgcttgtccttgcatcac

SEQ ID NO: 13682 - DNA, 20 bp, Artificial Sequence
  Chr13_1 Forward Primer
atctttggactgcccatacc

SEQ ID NO: 13683 - DNA, 20 bp, Artificial Sequence
  Chr13_1 Forward Primer
acagctgtcttgtcaatgcc

SEQ ID NO: 13684 - DNA, 20 bp, Artificial Sequence
  Chr13_1 Forward Primer
tgcctagagttgttctgggg

SEQ ID NO: 13685 - DNA, 20 bp, Artificial Sequence
  Chr13_1 Forward Primer
tgcagggaaagcagaaagat

SEQ ID NO: 13686 - DNA, 21 bp, Artificial Sequence
  Chr13_1 Forward Primer
gcttttgaagtagggaaggct

SEQ ID NO: 13687 - DNA, 22 bp, Artificial Sequence
  Chr13_1 Forward Primer
tgctgttcatgtcttcttttga

SEQ ID NO: 13688 - DNA, 20 bp, Artificial Sequence
  Chr13_1 Forward Primer
agcaaggggaaagaaggaag

SEQ ID NO: 13689 - DNA, 20 bp, Artificial Sequence
  Chr13_1 Forward Primer
ctagcgtggggttatccaag

SEQ ID NO: 13690 - DNA, 20 bp, Artificial Sequence
  Chr13_1 Forward Primer
tggattaaaaagggccagaa

SEQ ID NO: 13691 - DNA, 20 bp, Artificial Sequence
  Chr13_1 Forward Primer
ggtcctcatgggagacagtg

SEQ ID NO: 13692 - DNA, 24 bp, Artificial Sequence
  Chr13_1 Forward Primer
tggtctcccaaagtaacttatcgt

SEQ ID NO: 13693 - DNA, 20 bp, Artificial Sequence
  Chr13_1 Forward Primer
cacagtggatggtttaggca

SEQ ID NO: 13694 - DNA, 20 bp, Artificial Sequence
  Chr13_1 Forward Primer
ttatcacagtggcctccaaa

SEQ ID NO: 13695 - DNA, 20 bp, Artificial Sequence
  Chr13_1 Forward Primer
ggccctactatttgttcccc

SEQ ID NO: 13696 - DNA, 20 bp, Artificial Sequence
  Chr13_1 Forward Primer
agacagctggagagcaccat

SEQ ID NO: 13697 - DNA, 20 bp, Artificial Sequence
  Chr13_1 Forward Primer
ttccgtgtgtgcttgagaag

SEQ ID NO: 13698 - DNA, 20 bp, Artificial Sequence
  Chr13_1 Forward Primer
cgttctttaatgtggcaccc

SEQ ID NO: 13699 - DNA, 20 bp, Artificial Sequence
  Chr13_1 Forward Primer
ggcatggaccacattctttt

SEQ ID NO: 13700 - DNA, 20 bp, Artificial Sequence
  Chr13_1 Forward Primer
cataattggcctgtgtgtgc

SEQ ID NO: 13701 - DNA, 20 bp, Artificial Sequence
  Chr13_1 Forward Primer
ggcagcaggttatttccctt

SEQ ID NO: 13702 - DNA, 20 bp, Artificial Sequence
  Chr13_1 Forward Primer
tgaagttgcatgaagctcag

SEQ ID NO: 13703 - DNA, 20 bp, Artificial Sequence
  Chr13_1 Forward Primer
aacttggggatggtgtttga

SEQ ID NO: 13704 - DNA, 21 bp, Artificial Sequence
  Chr13_1 Forward Primer
tttaaaatgggtcttgaggga

SEQ ID NO: 13705 - DNA, 20 bp, Artificial Sequence
  Chr13_1 Forward Primer
cagcatggagtctgcaaaag

SEQ ID NO: 13706 - DNA, 20 bp, Artificial Sequence
  Chr13_1 Forward Primer
gccctggtttatatggctcc

SEQ ID NO: 13707 - DNA, 23 bp, Artificial Sequence
  Chr13_1 Forward Primer
tccacctctttaaaaggagacaa

SEQ ID NO: 13708 - DNA, 20 bp, Artificial Sequence
  Chr13_1 Forward Primer
gcctcactgtaaatccagcc

SEQ ID NO: 13709 - DNA, 20 bp, Artificial Sequence
  Chr13_1 Forward Primer
atgccctttgccttctaggt

SEQ ID NO: 13710 - DNA, 20 bp, Artificial Sequence
  Chr13_1 Forward Primer
agttccgattgctttgatgg

SEQ ID NO: 13711 - DNA, 20 bp, Artificial Sequence
  Chr13_1 Forward Primer
agagtggccatccatttttg

SEQ ID NO: 13712 - DNA, 20 bp, Artificial Sequence
  Chr13_1 Forward Primer
ccaggaacatgctcaggaat

SEQ ID NO: 13713 - DNA, 20 bp, Artificial Sequence
  Chr13_1 Forward Primer
acttggtgactgtgcttccc

SEQ ID NO: 13714 - DNA, 20 bp, Artificial Sequence
  Chr13_1 Forward Primer
tctgtggcttcctgacagtg

SEQ ID NO: 13715 - DNA, 20 bp, Artificial Sequence
  Chr13_1 Forward Primer
caaccagagcctcagtgtca

SEQ ID NO: 13716 - DNA, 21 bp, Artificial Sequence
  Chr13_1 Forward Primer
cttgcaacttcattgagggag

SEQ ID NO: 13717 - DNA, 20 bp, Artificial Sequence
  Chr13_1 Forward Primer
tccggattctgtggtctttc

SEQ ID NO: 13718 - DNA, 20 bp, Artificial Sequence
  Chr13_1 Forward Primer
cttcccccgaggactaaaag

SEQ ID NO: 13719 - DNA, 20 bp, Artificial Sequence
  Chr13_1 Forward Primer
ttgcttcctcccttcctttt

SEQ ID NO: 13720 - DNA, 20 bp, Artificial Sequence
  Chr13_1 Forward Primer
ggcccatgtagtgcttgact

SEQ ID NO: 13721 - DNA, 21 bp, Artificial Sequence
  Chr13_1 Forward Primer
catggtgaacttacaggctgc

SEQ ID NO: 13722 - DNA, 20 bp, Artificial Sequence
  Chr13_1 Forward Primer
aggtggtgtcagcataaggg

SEQ ID NO: 13723 - DNA, 20 bp, Artificial Sequence
  Chr13_1 Forward Primer
gggcagttcatgatgtaggg

SEQ ID NO: 13724 - DNA, 20 bp, Artificial Sequence
  Chr13_1 Forward Primer
ccaactgcactgagtccctt

SEQ ID NO: 13725 - DNA, 20 bp, Artificial Sequence
  Chr13_1 Forward Primer
ggaaggtcagcatgcctcta

SEQ ID NO: 13726 - DNA, 26 bp, Artificial Sequence
  Chr13_1 Forward Primer
gtcaattgtctttgtagcatgtcttt

SEQ ID NO: 13727 - DNA, 23 bp, Artificial Sequence
  Chr13_1 Forward Primer
tgggggaaaaatgttatatgtga

SEQ ID NO: 13728 - DNA, 20 bp, Artificial Sequence
  Chr13_1 Forward Primer
aggttttggaaaacagggct

SEQ ID NO: 13729 - DNA, 20 bp, Artificial Sequence
  Chr13_1 Forward Primer
ctaagcggcccattgagtag

SEQ ID NO: 13730 - DNA, 21 bp, Artificial Sequence
  Chr13_1 Forward Primer
tttgttccaaagcatggactt

SEQ ID NO: 13731 - DNA, 20 bp, Artificial Sequence
  Chr13_1 Forward Primer
agacactccttcccctaccc

SEQ ID NO: 13732 - DNA, 21 bp, Artificial Sequence
  Chr13_1 Forward Primer
aacaaaaatcacacattggca

SEQ ID NO: 13733 - DNA, 20 bp, Artificial Sequence
  Chr13_1 Forward Primer
ggaaaagctgcatttgctgt

SEQ ID NO: 13734 - DNA, 20 bp, Artificial Sequence
  Chr13_1 Forward Primer
gtcaggctttcccatcacat

SEQ ID NO: 13735 - DNA, 20 bp, Artificial Sequence
  Chr13_1 Forward Primer
catccaatcccatcttttgg

SEQ ID NO: 13736 - DNA, 20 bp, Artificial Sequence
  Chr13_1 Forward Primer
agaagagcacccctctaggc

SEQ ID NO: 13737 - DNA, 20 bp, Artificial Sequence
  Chr13_1 Forward Primer
catgatgggctgttgattga

SEQ ID NO: 13738 - DNA, 20 bp, Artificial Sequence
  Chr13_1 Forward Primer
gcgccaggtaggtaagagaa

SEQ ID NO: 13739 - DNA, 20 bp, Artificial Sequence
  Chr13_1 Forward Primer
gtgatctggatcaatgcacg

SEQ ID NO: 13740 - DNA, 20 bp, Artificial Sequence
  Chr13_1 Forward Primer
aaggtttggggctcagaagt

SEQ ID NO: 13741 - DNA, 19 bp, Artificial Sequence
  Chr13_1 Forward Primer
ctctccctcccagtgtggt

SEQ ID NO: 13742 - DNA, 22 bp, Artificial Sequence
  Chr13_1 Forward Primer
aatgctctccctctttttcttt

SEQ ID NO: 13743 - DNA, 20 bp, Artificial Sequence
  Chr13_1 Forward Primer
gaccccgacaaagtacctga

SEQ ID NO: 13744 - DNA, 20 bp, Artificial Sequence
  Chr13_1 Forward Primer
caggccagataggcattttg

SEQ ID NO: 13745 - DNA, 21 bp, Artificial Sequence
  Chr13_1 Reverse Primer
gaggataaaacccaaatgcaa

SEQ ID NO: 13746 - DNA, 20 bp, Artificial Sequence
  Chr13_1 Reverse Primer
ccctgaacaaattgaaaggc

SEQ ID NO: 13747 - DNA, 20 bp, Artificial Sequence
  Chr13_1 Reverse Primer
ccaacaccctgctaagtgct

SEQ ID NO: 13748 - DNA, 20 bp, Artificial Sequence
  Chr13_1 Reverse Primer
cccccagatgcaaatcagta

SEQ ID NO: 13749 - DNA, 20 bp, Artificial Sequence
  Chr13_1 Reverse Primer
aatgagcactggaatgggag

SEQ ID NO: 13750 - DNA, 20 bp, Artificial Sequence
  Chr13_1 Reverse Primer
acacgaaacaagcagcacac

SEQ ID NO: 13751 - DNA, 20 bp, Artificial Sequence
  Chr13_1 Reverse Primer
cctgtactcaccccactcgt

SEQ ID NO: 13752 - DNA, 20 bp, Artificial Sequence
  Chr13_1 Reverse Primer
gagcactttcccaggttgag

SEQ ID NO: 13753 - DNA, 20 bp, Artificial Sequence
  Chr13_1 Reverse Primer
aacagagacaggcccagaga

SEQ ID NO: 13754 - DNA, 20 bp, Artificial Sequence
  Chr13_1 Reverse Primer
tttctgaagcatgagagccc

SEQ ID NO: 13755 - DNA, 20 bp, Artificial Sequence
  Chr13_1 Reverse Primer
cgtgcaactgagaagcaaag

SEQ ID NO: 13756 - DNA, 20 bp, Artificial Sequence
  Chr13_1 Reverse Primer
gaaaggcgagttctggtgtc

SEQ ID NO: 13757 - DNA, 20 bp, Artificial Sequence
  Chr13_1 Reverse Primer
gccaccgtttctgttttgtt

SEQ ID NO: 13758 - DNA, 20 bp, Artificial Sequence
  Chr13_1 Reverse Primer
gggtcagagtgaaactggga

SEQ ID NO: 13759 - DNA, 20 bp, Artificial Sequence
  Chr13_1 Reverse Primer
ttgggctgggtttaaggtag

SEQ ID NO: 13760 - DNA, 20 bp, Artificial Sequence
  Chr13_1 Reverse Primer
ccatccgaccgtaataagga

SEQ ID NO: 13761 - DNA, 20 bp, Artificial Sequence
  Chr13_1 Reverse Primer
ccaactcccctcccttactg

SEQ ID NO: 13762 - DNA, 20 bp, Artificial Sequence
  Chr13_1 Reverse Primer
cctgcagtatagctgcctcc

SEQ ID NO: 13763 - DNA, 20 bp, Artificial Sequence
  Chr13_1 Reverse Primer
ttgggcacaagatacccact

SEQ ID NO: 13764 - DNA, 20 bp, Artificial Sequence
  Chr13_1 Reverse Primer
gggctgcacactatggaaat

SEQ ID NO: 13765 - DNA, 20 bp, Artificial Sequence
  Chr13_1 Reverse Primer
gtctagttgcccaaactggc

SEQ ID NO: 13766 - DNA, 20 bp, Artificial Sequence
  Chr13_1 Reverse Primer
ggtgagcatgaggagcaaat

SEQ ID NO: 13767 - DNA, 20 bp, Artificial Sequence
  Chr13_1 Reverse Primer
tgcctgttgttctggtatcg

SEQ ID NO: 13768 - DNA, 21 bp, Artificial Sequence
  Chr13_1 Reverse Primer
cgtgcttcagaagaaggacac

SEQ ID NO: 13769 - DNA, 20 bp, Artificial Sequence
  Chr13_1 Reverse Primer
tctctcaaagacaggctcgg

SEQ ID NO: 13770 - DNA, 20 bp, Artificial Sequence
  Chr13_1 Reverse Primer
ctaggggtgaggggtctagc

SEQ ID NO: 13771 - DNA, 20 bp, Artificial Sequence
  Chr13_1 Reverse Primer
aataaccctcctgcctcacc

SEQ ID NO: 13772 - DNA, 20 bp, Artificial Sequence
  Chr13_1 Reverse Primer
actgctgctgctgtgtcact

SEQ ID NO: 13773 - DNA, 20 bp, Artificial Sequence
  Chr13_1 Reverse Primer
tctagcaaggctggagtgct

SEQ ID NO: 13774 - DNA, 20 bp, Artificial Sequence
  Chr13_1 Reverse Primer
tccagaacctgaagcaatcc

SEQ ID NO: 13775 - DNA, 20 bp, Artificial Sequence
  Chr13_1 Reverse Primer
tcatgacatggttctctggc

SEQ ID NO: 13776 - DNA, 20 bp, Artificial Sequence
  Chr13_1 Reverse Primer
gaagcacagggtcgatgact

SEQ ID NO: 13777 - DNA, 20 bp, Artificial Sequence
  Chr13_1 Reverse Primer
caagtcagaggcttcccaag

SEQ ID NO: 13778 - DNA, 25 bp, Artificial Sequence
  Chr13_1 Reverse Primer
cattcaagaagctattattgagggt

SEQ ID NO: 13779 - DNA, 19 bp, Artificial Sequence
  Chr13_1 Reverse Primer
attagcccccaagcaactg

SEQ ID NO: 13780 - DNA, 20 bp, Artificial Sequence
  Chr13_1 Reverse Primer
attagccagtgttgcccatc

SEQ ID NO: 13781 - DNA, 20 bp, Artificial Sequence
  Chr13_1 Reverse Primer
cacaccaaaatgtgggtcat

SEQ ID NO: 13782 - DNA, 21 bp, Artificial Sequence
  Chr13_1 Reverse Primer
ttcttctaaaggggcattcct

SEQ ID NO: 13783 - DNA, 27 bp, Artificial Sequence
  Chr13_1 Reverse Primer
tgcatatcaaatattgagttcttgttt

SEQ ID NO: 13784 - DNA, 20 bp, Artificial Sequence
  Chr13_1 Reverse Primer
aaactgcccacatacatccc

SEQ ID NO: 13785 - DNA, 20 bp, Artificial Sequence
  Chr13_1 Reverse Primer
agctcccccttctcattcat

SEQ ID NO: 13786 - DNA, 22 bp, Artificial Sequence
  Chr13_1 Reverse Primer
caaagagatgggatttttcaca

SEQ ID NO: 13787 - DNA, 20 bp, Artificial Sequence
  Chr13_1 Reverse Primer
ttaagtccctgctgcgtacc

SEQ ID NO: 13788 - DNA, 26 bp, Artificial Sequence
  Chr13_1 Reverse Primer
tttttacaagcctaatggtagaaaat

SEQ ID NO: 13789 - DNA, 21 bp, Artificial Sequence
  Chr13_1 Reverse Primer
ttcaactgtgacccactcaaa

SEQ ID NO: 13790 - DNA, 26 bp, Artificial Sequence
  Chr13_1 Reverse Primer
ttctttaaaattgtttactttgctgt

SEQ ID NO: 13791 - DNA, 20 bp, Artificial Sequence
  Chr13_1 Reverse Primer
gagagatgagacagcctggg

SEQ ID NO: 13792 - DNA, 20 bp, Artificial Sequence
  Chr13_1 Reverse Primer
accctttctttcattgccct

SEQ ID NO: 13793 - DNA, 20 bp, Artificial Sequence
  Chr13_1 Reverse Primer
tcctgtctgggttttgaagg

SEQ ID NO: 13794 - DNA, 20 bp, Artificial Sequence
  Chr13_1 Reverse Primer
cttcaggtggagaaggcaag

SEQ ID NO: 13795 - DNA, 20 bp, Artificial Sequence
  Chr13_1 Reverse Primer
tggaagatggtgattcctcc

SEQ ID NO: 13796 - DNA, 20 bp, Artificial Sequence
  Chr13_1 Reverse Primer
ccatccagactgggaagaaa

SEQ ID NO: 13797 - DNA, 20 bp, Artificial Sequence
  Chr13_1 Reverse Primer
gcccgtttctttccttctct

SEQ ID NO: 13798 - DNA, 23 bp, Artificial Sequence
  Chr13_1 Reverse Primer
tgaagacaaaaacaagcaaacaa

SEQ ID NO: 13799 - DNA, 20 bp, Artificial Sequence
  Chr13_1 Reverse Primer
ggatgccaaaacatctgtcc

SEQ ID NO: 13800 - DNA, 21 bp, Artificial Sequence
  Chr13_1 Reverse Primer
gccatgcctctaaactttctg

SEQ ID NO: 13801 - DNA, 20 bp, Artificial Sequence
  Chr13_1 Reverse Primer
cctgcctggtcttcaagaaa

SEQ ID NO: 13802 - DNA, 20 bp, Artificial Sequence
  Chr13_1 Reverse Primer
tgggacagagggacctacag

SEQ ID NO: 13803 - DNA, 21 bp, Artificial Sequence
  Chr13_1 Reverse Primer
tccactgtgtcagtgtgcatt

SEQ ID NO: 13804 - DNA, 20 bp, Artificial Sequence
  Chr13_1 Reverse Primer
tttcaccatcaggaccaaca

SEQ ID NO: 13805 - DNA, 20 bp, Artificial Sequence
  Chr13_1 Reverse Primer
tgtggtatcctgttccacga

SEQ ID NO: 13806 - DNA, 20 bp, Artificial Sequence
  Chr13_1 Reverse Primer
tgaaaattggtcacgcacat

SEQ ID NO: 13807 - DNA, 22 bp, Artificial Sequence
  Chr13_1 Reverse Primer
tggccagcagtatagatgctaa

SEQ ID NO: 13808 - DNA, 20 bp, Artificial Sequence
  Chr13_1 Reverse Primer
taggcatctgactcagggct

SEQ ID NO: 13809 - DNA, 21 bp, Artificial Sequence
  Chr13_1 Reverse Primer
tcaactcctccagctctcaaa

SEQ ID NO: 13810 - DNA, 20 bp, Artificial Sequence
  Chr13_1 Reverse Primer
aggaaggaatgccaggattt

SEQ ID NO: 13811 - DNA, 20 bp, Artificial Sequence
  Chr13_1 Reverse Primer
gcgtgttatgtgtggatgga

SEQ ID NO: 13812 - DNA, 20 bp, Artificial Sequence
  Chr13_1 Reverse Primer
agttgccttcttggctgaaa

SEQ ID NO: 13813 - DNA, 20 bp, Artificial Sequence
  Chr13_1 Reverse Primer
cagtggttcccactccactt

SEQ ID NO: 13814 - DNA, 20 bp, Artificial Sequence
  Chr13_1 Reverse Primer
gcatttaagctttgggcact

SEQ ID NO: 13815 - DNA, 20 bp, Artificial Sequence
  Chr13_1 Reverse Primer
gcttccactaaccgtgcttc

SEQ ID NO: 13816 - DNA, 20 bp, Artificial Sequence
  Chr13_1 Reverse Primer
tgaggaatgtcatgttggga

SEQ ID NO: 13817 - DNA, 19 bp, Artificial Sequence
  Chr13_1 Reverse Primer
ccttcccctcctcaacact

SEQ ID NO: 13818 - DNA, 20 bp, Artificial Sequence
  Chr13_1 Reverse Primer
ctcagatacccacagcggat

SEQ ID NO: 13819 - DNA, 20 bp, Artificial Sequence
  Chr13_1 Reverse Primer
aaggaggaaaggacagggaa

SEQ ID NO: 13820 - DNA, 20 bp, Artificial Sequence
  Chr13_1 Reverse Primer
gggtaactgtgggtgagtcg

SEQ ID NO: 13821 - DNA, 20 bp, Artificial Sequence
  Chr13_1 Reverse Primer
atgggagatactggaagggg

SEQ ID NO: 13822 - DNA, 24 bp, Artificial Sequence
  Chr13_1 Reverse Primer
tgatcacttaaaatgcacatcaaa

SEQ ID NO: 13823 - DNA, 20 bp, Artificial Sequence
  Chr13_1 Reverse Primer
aggggtactcccacagagga

SEQ ID NO: 13824 - DNA, 20 bp, Artificial Sequence
  Chr13_1 Reverse Primer
gttgttgcaaggatcagggt

SEQ ID NO: 13825 - DNA, 20 bp, Artificial Sequence
  Chr13_1 Reverse Primer
agtgtaatccacatgggcaa

SEQ ID NO: 13826 - DNA, 20 bp, Artificial Sequence
  Chr13_1 Reverse Primer
acccaccacgtttctaatgc

SEQ ID NO: 13827 - DNA, 27 bp, Artificial Sequence
  Chr13_1 Reverse Primer
aaataatctctttaggatcacacttca

SEQ ID NO: 13828 - DNA, 20 bp, Artificial Sequence
  Chr13_1 Reverse Primer
ttgtgcaaacatgacattgc

SEQ ID NO: 13829 - DNA, 21 bp, Artificial Sequence
  Chr13_1 Reverse Primer
tggttctctcacctctccaag

SEQ ID NO: 13830 - DNA, 20 bp, Artificial Sequence
  Chr13_1 Reverse Primer
tccagcaggaaatcacatca

SEQ ID NO: 13831 - DNA, 24 bp, Artificial Sequence
  Chr13_1 Reverse Primer
cctctcatctctattgaaacggat

SEQ ID NO: 13832 - DNA, 20 bp, Artificial Sequence
  Chr13_1 Reverse Primer
tgcatcaggcaaagacaaaa

SEQ ID NO: 13833 - DNA, 20 bp, Artificial Sequence
  Chr13_1 Reverse Primer
gacccaggggacagacagta

SEQ ID NO: 13834 - DNA, 20 bp, Artificial Sequence
  Chr13_1 Reverse Primer
acacacacacaccacatccc

SEQ ID NO: 13835 - DNA, 20 bp, Artificial Sequence
  Chr13_1 Reverse Primer
ttaacaggtccctgggagaa

SEQ ID NO: 13836 - DNA, 26 bp, Artificial Sequence
  Chr13_1 Reverse Primer
gctcagatataacagctttaacacca

SEQ ID NO: 13837 - DNA, 20 bp, Artificial Sequence
  Chr13_1 Reverse Primer
ttgcaaaaactgcctaaccc

SEQ ID NO: 13838 - DNA, 20 bp, Artificial Sequence
  Chr13_1 Reverse Primer
gtgaatttctggtgccgttt

SEQ ID NO: 13839 - DNA, 20 bp, Artificial Sequence
  Chr13_1 Reverse Primer
atattcccatccaagcctcc

SEQ ID NO: 13840 - DNA, 20 bp, Artificial Sequence
  Chr13_1 Reverse Primer
tcagtgtcatgagcgatgtg

SEQ ID NO: 13841 - DNA, 20 bp, Artificial Sequence
  Chr13_2 Forward Primer
tactggctccccaaaatgtc

SEQ ID NO: 13842 - DNA, 20 bp, Artificial Sequence
  Chr13_2 Forward Primer
cctgtgcttccataccttcc

SEQ ID NO: 13843 - DNA, 20 bp, Artificial Sequence
  Chr13_2 Forward Primer
tcttgtgtttgcaatcctgc

SEQ ID NO: 13844 - DNA, 20 bp, Artificial Sequence
  Chr13_2 Forward Primer
gctgccttaatctgtttggc

SEQ ID NO: 13845 - DNA, 20 bp, Artificial Sequence
  Chr13_2 Forward Primer
atctctcatgtgtgggggag

SEQ ID NO: 13846 - DNA, 22 bp, Artificial Sequence
  Chr13_2 Forward Primer
aggctcaacaaaacactttgaa

SEQ ID NO: 13847 - DNA, 20 bp, Artificial Sequence
  Chr13_2 Forward Primer
aaggtctgtgaaatgccctg

SEQ ID NO: 13848 - DNA, 20 bp, Artificial Sequence
  Chr13_2 Forward Primer
acacagcaatggttggaaca

SEQ ID NO: 13849 - DNA, 20 bp, Artificial Sequence
  Chr13_2 Forward Primer
ctgacaaacctcccctggta

SEQ ID NO: 13850 - DNA, 20 bp, Artificial Sequence
  Chr13_2 Forward Primer
ttcagacctggcttctgagc

SEQ ID NO: 13851 - DNA, 21 bp, Artificial Sequence
  Chr13_2 Forward Primer
tcagcaaccttttctctcaaa

SEQ ID NO: 13852 - DNA, 23 bp, Artificial Sequence
  Chr13_2 Forward Primer
tgagtgcaaggataattaagcaa

SEQ ID NO: 13853 - DNA, 22 bp, Artificial Sequence
  Chr13_2 Forward Primer
tctatgcccaaattactgctca

SEQ ID NO: 13854 - DNA, 20 bp, Artificial Sequence
  Chr13_2 Forward Primer
acctaccttggagggtttcg

SEQ ID NO: 13855 - DNA, 22 bp, Artificial Sequence
  Chr13_2 Forward Primer
aacactgttgggaatgttcata

SEQ ID NO: 13856 - DNA, 20 bp, Artificial Sequence
  Chr13_2 Forward Primer
tcctcccatcacccacttta

SEQ ID NO: 13857 - DNA, 21 bp, Artificial Sequence
  Chr13_2 Forward Primer
tcttcaagctcaaattccagg

SEQ ID NO: 13858 - DNA, 22 bp, Artificial Sequence
  Chr13_2 Forward Primer
gccaagttcaaaaactcaactg

SEQ ID NO: 13859 - DNA, 20 bp, Artificial Sequence
  Chr13_2 Forward Primer
tcataattagcccttgggaa

SEQ ID NO: 13860 - DNA, 20 bp, Artificial Sequence
  Chr13_2 Forward Primer
ttgagcatagctgcctctca

SEQ ID NO: 13861 - DNA, 20 bp, Artificial Sequence
  Chr13_2 Forward Primer
attaagccagctgccatgtg

SEQ ID NO: 13862 - DNA, 20 bp, Artificial Sequence
  Chr13_2 Forward Primer
atgggttcttgctccagttg

SEQ ID NO: 13863 - DNA, 20 bp, Artificial Sequence
  Chr13_2 Forward Primer
tacttggttttgctgcctgc

SEQ ID NO: 13864 - DNA, 20 bp, Artificial Sequence
  Chr13_2 Forward Primer
tttgcccaaaatgttggaat

SEQ ID NO: 13865 - DNA, 20 bp, Artificial Sequence
  Chr13_2 Forward Primer
cccacaaacggtcacttctc

SEQ ID NO: 13866 - DNA, 20 bp, Artificial Sequence
  Chr13_2 Forward Primer
ctggttcaaattcaggcaca

SEQ ID NO: 13867 - DNA, 20 bp, Artificial Sequence
  Chr13_2 Forward Primer
tatgcagcacccaatctttg

SEQ ID NO: 13868 - DNA, 20 bp, Artificial Sequence
  Chr13_2 Forward Primer
aagcaagaagtggggaggat

SEQ ID NO: 13869 - DNA, 20 bp, Artificial Sequence
  Chr13_2 Forward Primer
ggtacctttctgggagcaca

SEQ ID NO: 13870 - DNA, 20 bp, Artificial Sequence
  Chr13_2 Forward Primer
ccttgcctctactgtggacc

SEQ ID NO: 13871 - DNA, 20 bp, Artificial Sequence
  Chr13_2 Forward Primer
gccacagatgtacagcagga

SEQ ID NO: 13872 - DNA, 20 bp, Artificial Sequence
  Chr13_2 Forward Primer
atgaggtcaggctggagaga

SEQ ID NO: 13873 - DNA, 20 bp, Artificial Sequence
  Chr13_2 Forward Primer
gataggcaggggtggttaca

SEQ ID NO: 13874 - DNA, 20 bp, Artificial Sequence
  Chr13_2 Forward Primer
aaatcctcagtgatggcgag

SEQ ID NO: 13875 - DNA, 20 bp, Artificial Sequence
  Chr13_2 Forward Primer
gtcccagatgagtgccattt

SEQ ID NO: 13876 - DNA, 20 bp, Artificial Sequence
  Chr13_2 Forward Primer
cctgtctctgatccccaaaa

SEQ ID NO: 13877 - DNA, 22 bp, Artificial Sequence
  Chr13_2 Forward Primer
ggttctttttcggtgctacttg

SEQ ID NO: 13878 - DNA, 20 bp, Artificial Sequence
  Chr13_2 Forward Primer
tgcctgttccactgtgatgt

SEQ ID NO: 13879 - DNA, 20 bp, Artificial Sequence
  Chr13_2 Forward Primer
atctcttggtagccactgcc

SEQ ID NO: 13880 - DNA, 20 bp, Artificial Sequence
  Chr13_2 Forward Primer
ggcttcatgcatttcacaaa

SEQ ID NO: 13881 - DNA, 20 bp, Artificial Sequence
  Chr13_2 Forward Primer
ctttcccctggaccacctat

SEQ ID NO: 13882 - DNA, 20 bp, Artificial Sequence
  Chr13_2 Forward Primer
aggaaaccaagggagaggaa

SEQ ID NO: 13883 - DNA, 20 bp, Artificial Sequence
  Chr13_2 Forward Primer
gctgaaagcttgattccctg

SEQ ID NO: 13884 - DNA, 20 bp, Artificial Sequence
  Chr13_2 Forward Primer
catgtggcttcaatgtttgg

SEQ ID NO: 13885 - DNA, 20 bp, Artificial Sequence
  Chr13_2 Forward Primer
ggcattaccccaaataccaa

SEQ ID NO: 13886 - DNA, 23 bp, Artificial Sequence
  Chr13_2 Forward Primer
tgccttaaattcttactgcttgc

SEQ ID NO: 13887 - DNA, 21 bp, Artificial Sequence
  Chr13_2 Forward Primer
ctggtcaattcagtttctggg

SEQ ID NO: 13888 - DNA, 21 bp, Artificial Sequence
  Chr13_2 Forward Primer
tgcttgcaaatgttctcaaaa

SEQ ID NO: 13889 - DNA, 23 bp, Artificial Sequence
  Chr13_2 Forward Primer
tcagatattagcattggggaaga

SEQ ID NO: 13890 - DNA, 27 bp, Artificial Sequence
  Chr13_2 Forward Primer
tcgttagtatctatgagatctcccact

SEQ ID NO: 13891 - DNA, 20 bp, Artificial Sequence
  Chr13_2 Forward Primer
ttacccgctttacagaagcc

SEQ ID NO: 13892 - DNA, 21 bp, Artificial Sequence
  Chr13_2 Forward Primer
tcttgttttgcaactgactgc

SEQ ID NO: 13893 - DNA, 20 bp, Artificial Sequence
  Chr13_2 Forward Primer
gcttggttttgggggatagt

SEQ ID NO: 13894 - DNA, 20 bp, Artificial Sequence
  Chr13_2 Forward Primer
agccttagaagcaagagggg

SEQ ID NO: 13895 - DNA, 20 bp, Artificial Sequence
  Chr13_2 Forward Primer
ggagtcagcctaggagcaga

SEQ ID NO: 13896 - DNA, 20 bp, Artificial Sequence
  Chr13_2 Forward Primer
cctggtcacattccttggat

SEQ ID NO: 13897 - DNA, 20 bp, Artificial Sequence
  Chr13_2 Forward Primer
catgttccctgcttgcatct

SEQ ID NO: 13898 - DNA, 20 bp, Artificial Sequence
  Chr13_2 Forward Primer
ccattgccctcatgattttt

SEQ ID NO: 13899 - DNA, 20 bp, Artificial Sequence
  Chr13_2 Forward Primer
tgatgagtaggtggcaccag

SEQ ID NO: 13900 - DNA, 20 bp, Artificial Sequence
  Chr13_2 Forward Primer
ggaatgactcacggcctaaa

SEQ ID NO: 13901 - DNA, 20 bp, Artificial Sequence
  Chr13_2 Forward Primer
gcagagcttcattttcctgg

SEQ ID NO: 13902 - DNA, 20 bp, Artificial Sequence
  Chr13_2 Forward Primer
gccagaagttccaaagcact

SEQ ID NO: 13903 - DNA, 20 bp, Artificial Sequence
  Chr13_2 Forward Primer
tggggaaatggaagaaaaat

SEQ ID NO: 13904 - DNA, 20 bp, Artificial Sequence
  Chr13_2 Forward Primer
cagttgctacaggccacatc

SEQ ID NO: 13905 - DNA, 20 bp, Artificial Sequence
  Chr13_2 Forward Primer
agaggaaaccatggcaacac

SEQ ID NO: 13906 - DNA, 20 bp, Artificial Sequence
  Chr13_2 Forward Primer
ggagatctgagagggcagtg

SEQ ID NO: 13907 - DNA, 20 bp, Artificial Sequence
  Chr13_2 Forward Primer
ttgaagcttcctcgccctat

SEQ ID NO: 13908 - DNA, 20 bp, Artificial Sequence
  Chr13_2 Forward Primer
ccaaaagcaacaagcacaca

SEQ ID NO: 13909 - DNA, 20 bp, Artificial Sequence
  Chr13_2 Forward Primer
gttttagtcctggctctgcc

SEQ ID NO: 13910 - DNA, 20 bp, Artificial Sequence
  Chr13_2 Forward Primer
atacaggctggcttcagcac

SEQ ID NO: 13911 - DNA, 20 bp, Artificial Sequence
  Chr13_2 Forward Primer
gccacccagttagaacgaag

SEQ ID NO: 13912 - DNA, 21 bp, Artificial Sequence
  Chr13_2 Forward Primer
tgcagtcatgttcactttcca

SEQ ID NO: 13913 - DNA, 22 bp, Artificial Sequence
  Chr13_2 Forward Primer
tcaagcccctaactctacacaa

SEQ ID NO: 13914 - DNA, 20 bp, Artificial Sequence
  Chr13_2 Forward Primer
gcagttcagttctcccaagg

SEQ ID NO: 13915 - DNA, 20 bp, Artificial Sequence
  Chr13_2 Forward Primer
tgtcagtgcacaccagtgaa

SEQ ID NO: 13916 - DNA, 20 bp, Artificial Sequence
  Chr13_2 Forward Primer
atttcattctccatgggtgc

SEQ ID NO: 13917 - DNA, 20 bp, Artificial Sequence
  Chr13_2 Forward Primer
tgcaattcagtgatctttgg

SEQ ID NO: 13918 - DNA, 20 bp, Artificial Sequence
  Chr13_2 Forward Primer
acagcagcagcgtaattgtg

SEQ ID NO: 13919 - DNA, 19 bp, Artificial Sequence
  Chr13_2 Forward Primer
gcctagatgggcacctgat

SEQ ID NO: 13920 - DNA, 20 bp, Artificial Sequence
  Chr13_2 Forward Primer
ctgtcttccccaaatagcca

SEQ ID NO: 13921 - DNA, 20 bp, Artificial Sequence
  Chr13_2 Forward Primer
gaagtcccttgttatgggca

SEQ ID NO: 13922 - DNA, 20 bp, Artificial Sequence
  Chr13_2 Forward Primer
ggtgctgtaggaaaacgagg

SEQ ID NO: 13923 - DNA, 21 bp, Artificial Sequence
  Chr13_2 Forward Primer
tctctgccttctccttagcaa

SEQ ID NO: 13924 - DNA, 23 bp, Artificial Sequence
  Chr13_2 Forward Primer
ttttccttcttttccaagtgttt

SEQ ID NO: 13925 - DNA, 22 bp, Artificial Sequence
  Chr13_2 Forward Primer
ttcaggaagaaaggtggtagga

SEQ ID NO: 13926 - DNA, 21 bp, Artificial Sequence
  Chr13_2 Forward Primer
ggacagaaacaaaagggactg

SEQ ID NO: 13927 - DNA, 20 bp, Artificial Sequence
  Chr13_2 Forward Primer
atgtgcccttgaatggactc

SEQ ID NO: 13928 - DNA, 20 bp, Artificial Sequence
  Chr13_2 Forward Primer
gttcaagtcatgctctggca

SEQ ID NO: 13929 - DNA, 22 bp, Artificial Sequence
  Chr13_2 Forward Primer
ccacaaaataaaccctcattgg

SEQ ID NO: 13930 - DNA, 20 bp, Artificial Sequence
  Chr13_2 Forward Primer
aaccatatggggtcctgtga

SEQ ID NO: 13931 - DNA, 20 bp, Artificial Sequence
  Chr13_2 Forward Primer
agctgtgtggtacaggggat

SEQ ID NO: 13932 - DNA, 21 bp, Artificial Sequence
  Chr13_2 Forward Primer
cctagcacaaaactcatccca

SEQ ID NO: 13933 - DNA, 20 bp, Artificial Sequence
  Chr13_2 Forward Primer
tgcatctcctctcatcctcc

SEQ ID NO: 13934 - DNA, 21 bp, Artificial Sequence
  Chr13_2 Forward Primer
caatgtgtggtctaattgggg

SEQ ID NO: 13935 - DNA, 20 bp, Artificial Sequence
  Chr13_2 Forward Primer
catgtcaacggggaattttt

SEQ ID NO: 13936 - DNA, 21 bp, Artificial Sequence
  Chr13_2 Forward Primer
catattgccttgaccttggaa

SEQ ID NO: 13937 - DNA, 20 bp, Artificial Sequence
  Chr13_2 Reverse Primer
tcacatcgcctctgattctg

SEQ ID NO: 13938 - DNA, 20 bp, Artificial Sequence
  Chr13_2 Reverse Primer
ccacacgtttgacaagcatt

SEQ ID NO: 13939 - DNA, 20 bp, Artificial Sequence
  Chr13_2 Reverse Primer
ctgatgctagaggtccaggc

SEQ ID NO: 13940 - DNA, 20 bp, Artificial Sequence
  Chr13_2 Reverse Primer
ggcaatgcatttaactcgtg

SEQ ID NO: 13941 - DNA, 21 bp, Artificial Sequence
  Chr13_2 Reverse Primer
cgtaggtcaacagtttctgcc

SEQ ID NO: 13942 - DNA, 24 bp, Artificial Sequence
  Chr13_2 Reverse Primer
tcgtattggcttttaacagaagaa

SEQ ID NO: 13943 - DNA, 21 bp, Artificial Sequence
  Chr13_2 Reverse Primer
tgctaagcaactgaaaaaggg

SEQ ID NO: 13944 - DNA, 20 bp, Artificial Sequence
  Chr13_2 Reverse Primer
taaggggaaagggtgtcaga

SEQ ID NO: 13945 - DNA, 20 bp, Artificial Sequence
  Chr13_2 Reverse Primer
tatgcaagaatatgcgagcg

SEQ ID NO: 13946 - DNA, 20 bp, Artificial Sequence
  Chr13_2 Reverse Primer
gggggagagagagagtgtga

SEQ ID NO: 13947 - DNA, 20 bp, Artificial Sequence
  Chr13_2 Reverse Primer
catctcctcttcatgccgtc

SEQ ID NO: 13948 - DNA, 20 bp, Artificial Sequence
  Chr13_2 Reverse Primer
agaaaggcctgcctaaatgc

SEQ ID NO: 13949 - DNA, 20 bp, Artificial Sequence
  Chr13_2 Reverse Primer
caaaattacaacccggcaag

SEQ ID NO: 13950 - DNA, 20 bp, Artificial Sequence
  Chr13_2 Reverse Primer
tctggtcagccacatctcag

SEQ ID NO: 13951 - DNA, 20 bp, Artificial Sequence
  Chr13_2 Reverse Primer
ggaaaaagcccccaaataaa

SEQ ID NO: 13952 - DNA, 20 bp, Artificial Sequence
  Chr13_2 Reverse Primer
cccaaatgtaccttcctcca

SEQ ID NO: 13953 - DNA, 20 bp, Artificial Sequence
  Chr13_2 Reverse Primer
ccctttcctttcagaagctg

SEQ ID NO: 13954 - DNA, 20 bp, Artificial Sequence
  Chr13_2 Reverse Primer
ggtaaacttggccatccaga

SEQ ID NO: 13955 - DNA, 22 bp, Artificial Sequence
  Chr13_2 Reverse Primer
tcaggccacactttctttatga

SEQ ID NO: 13956 - DNA, 21 bp, Artificial Sequence
  Chr13_2 Reverse Primer
cactgggggaagtgactgtaa

SEQ ID NO: 13957 - DNA, 23 bp, Artificial Sequence
  Chr13_2 Reverse Primer
ttttatatttggggaagaagcaa

SEQ ID NO: 13958 - DNA, 20 bp, Artificial Sequence
  Chr13_2 Reverse Primer
gcaaatttacaccccagagg

SEQ ID NO: 13959 - DNA, 20 bp, Artificial Sequence
  Chr13_2 Reverse Primer
tacattagtgccctggacga

SEQ ID NO: 13960 - DNA, 20 bp, Artificial Sequence
  Chr13_2 Reverse Primer
ggacacacagaacacatgcc

SEQ ID NO: 13961 - DNA, 20 bp, Artificial Sequence
  Chr13_2 Reverse Primer
cccaaatcacatggtgacaa

SEQ ID NO: 13962 - DNA, 20 bp, Artificial Sequence
  Chr13_2 Reverse Primer
ggcacacaacaaccagcata

SEQ ID NO: 13963 - DNA, 20 bp, Artificial Sequence
  Chr13_2 Reverse Primer
ccgatggatgatgtgagaaa

SEQ ID NO: 13964 - DNA, 20 bp, Artificial Sequence
  Chr13_2 Reverse Primer
gcagtgaatgcagcttcaaa

SEQ ID NO: 13965 - DNA, 20 bp, Artificial Sequence
  Chr13_2 Reverse Primer
ggtgcaaataaggaaggcaa

SEQ ID NO: 13966 - DNA, 25 bp, Artificial Sequence
  Chr13_2 Reverse Primer
tggagaataaagtgagtcaaattca

SEQ ID NO: 13967 - DNA, 20 bp, Artificial Sequence
  Chr13_2 Reverse Primer
gcaggagtctgttacgaggc

SEQ ID NO: 13968 - DNA, 20 bp, Artificial Sequence
  Chr13_2 Reverse Primer
ttattcctgcatccccagag

SEQ ID NO: 13969 - DNA, 20 bp, Artificial Sequence
  Chr13_2 Reverse Primer
aacaatggagccatgaaagc

SEQ ID NO: 13970 - DNA, 20 bp, Artificial Sequence
  Chr13_2 Reverse Primer
ctgcgacagttccccttaaa

SEQ ID NO: 13971 - DNA, 20 bp, Artificial Sequence
  Chr13_2 Reverse Primer
catgcctattgccaggagtt

SEQ ID NO: 13972 - DNA, 20 bp, Artificial Sequence
  Chr13_2 Reverse Primer
gctgcttaagctcccacaac

SEQ ID NO: 13973 - DNA, 21 bp, Artificial Sequence
  Chr13_2 Reverse Primer
gacagccaagaaaatcaacca

SEQ ID NO: 13974 - DNA, 20 bp, Artificial Sequence
  Chr13_2 Reverse Primer
gtttgaaggcaggagctgag

SEQ ID NO: 13975 - DNA, 21 bp, Artificial Sequence
  Chr13_2 Reverse Primer
ttcacactttgaggtcacaca

SEQ ID NO: 13976 - DNA, 20 bp, Artificial Sequence
  Chr13_2 Reverse Primer
acagtcagaccacgccttct

SEQ ID NO: 13977 - DNA, 20 bp, Artificial Sequence
  Chr13_2 Reverse Primer
ttgctggtcctgtgtctgag

SEQ ID NO: 13978 - DNA, 20 bp, Artificial Sequence
  Chr13_2 Reverse Primer
aaaatgggcatcactcaacc

SEQ ID NO: 13979 - DNA, 20 bp, Artificial Sequence
  Chr13_2 Reverse Primer
ataccgtgtccttccattgc

SEQ ID NO: 13980 - DNA, 20 bp, Artificial Sequence
  Chr13_2 Reverse Primer
gcccaaagcatctcattgtt

SEQ ID NO: 13981 - DNA, 20 bp, Artificial Sequence
  Chr13_2 Reverse Primer
agtgggttgcagcacttaga

SEQ ID NO: 13982 - DNA, 21 bp, Artificial Sequence
  Chr13_2 Reverse Primer
tggcaatacgtgagaagtggt

SEQ ID NO: 13983 - DNA, 20 bp, Artificial Sequence
  Chr13_2 Reverse Primer
gcttcctcccattcagaaaa

SEQ ID NO: 13984 - DNA, 21 bp, Artificial Sequence
  Chr13_2 Reverse Primer
tgttactttgcagcagtttgg

SEQ ID NO: 13985 - DNA, 23 bp, Artificial Sequence
  Chr13_2 Reverse Primer
tgatggaaagatttctaagcctg

SEQ ID NO: 13986 - DNA, 27 bp, Artificial Sequence
  Chr13_2 Reverse Primer
aatgcatagaagaaataaaagatctgg

SEQ ID NO: 13987 - DNA, 20 bp, Artificial Sequence
  Chr13_2 Reverse Primer
tttgcacttgggaacatttg

SEQ ID NO: 13988 - DNA, 20 bp, Artificial Sequence
  Chr13_2 Reverse Primer
tcataccagtttttccccca

SEQ ID NO: 13989 - DNA, 20 bp, Artificial Sequence
  Chr13_2 Reverse Primer
cctgtggttaggcaaaatcc

SEQ ID NO: 13990 - DNA, 20 bp, Artificial Sequence
  Chr13_2 Reverse Primer
tggccactccagttctcttt

SEQ ID NO: 13991 - DNA, 20 bp, Artificial Sequence
  Chr13_2 Reverse Primer
atccaaatgttgggtcacct

SEQ ID NO: 13992 - DNA, 20 bp, Artificial Sequence
  Chr13_2 Reverse Primer
ggaaatccagcgtaaccaga

SEQ ID NO: 13993 - DNA, 24 bp, Artificial Sequence
  Chr13_2 Reverse Primer
gctttgaacatagcaggtactcaa

SEQ ID NO: 13994 - DNA, 20 bp, Artificial Sequence
  Chr13_2 Reverse Primer
agtgctgcattttggaaagc

SEQ ID NO: 13995 - DNA, 19 bp, Artificial Sequence
  Chr13_2 Reverse Primer
gtcagtgccattgagggtg

SEQ ID NO: 13996 - DNA, 20 bp, Artificial Sequence
  Chr13_2 Reverse Primer
gactttgtgtttgccaagcc

SEQ ID NO: 13997 - DNA, 20 bp, Artificial Sequence
  Chr13_2 Reverse Primer
gcaggcagttggctttattc

SEQ ID NO: 13998 - DNA, 21 bp, Artificial Sequence
  Chr13_2 Reverse Primer
caaggaaagcctgtaaggaaa

SEQ ID NO: 13999 - DNA, 20 bp, Artificial Sequence
  Chr13_2 Reverse Primer
aagcccagcttgtctgtcat

SEQ ID NO: 14000 - DNA, 21 bp, Artificial Sequence
  Chr13_2 Reverse Primer
catgctctgatttgtagggct

SEQ ID NO: 14001 - DNA, 20 bp, Artificial Sequence
  Chr13_2 Reverse Primer
ggacatgcaaatgctttagg

SEQ ID NO: 14002 - DNA, 20 bp, Artificial Sequence
  Chr13_2 Reverse Primer
ccccaactcacgaaaaccta

SEQ ID NO: 14003 - DNA, 20 bp, Artificial Sequence
  Chr13_2 Reverse Primer
tttctggagggagggaattt

SEQ ID NO: 14004 - DNA, 23 bp, Artificial Sequence
  Chr13_2 Reverse Primer
tcccaattaattttaagaggtgc

SEQ ID NO: 14005 - DNA, 20 bp, Artificial Sequence
  Chr13_2 Reverse Primer
ggtggaaggaagtgaggaca

SEQ ID NO: 14006 - DNA, 20 bp, Artificial Sequence
  Chr13_2 Reverse Primer
tgtgtgttccctgcattcat

SEQ ID NO: 14007 - DNA, 20 bp, Artificial Sequence
  Chr13_2 Reverse Primer
ctctgcctcctgtgcactta

SEQ ID NO: 14008 - DNA, 20 bp, Artificial Sequence
  Chr13_2 Reverse Primer
caaccattttggagcaaaca

SEQ ID NO: 14009 - DNA, 20 bp, Artificial Sequence
  Chr13_2 Reverse Primer
ctgcaagccatcattcattg

SEQ ID NO: 14010 - DNA, 21 bp, Artificial Sequence
  Chr13_2 Reverse Primer
cataggtctccttgtgtccca

SEQ ID NO: 14011 - DNA, 20 bp, Artificial Sequence
  Chr13_2 Reverse Primer
agggaaagggagtggaaatc

SEQ ID NO: 14012 - DNA, 20 bp, Artificial Sequence
  Chr13_2 Reverse Primer
acaacaagagggggaggagt

SEQ ID NO: 14013 - DNA, 20 bp, Artificial Sequence
  Chr13_2 Reverse Primer
aacctggtgcaaaagactgc

SEQ ID NO: 14014 - DNA, 20 bp, Artificial Sequence
  Chr13_2 Reverse Primer
catggaggcaaccatagctt

SEQ ID NO: 14015 - DNA, 20 bp, Artificial Sequence
  Chr13_2 Reverse Primer
gaggcaatgattgacccaag

SEQ ID NO: 14016 - DNA, 20 bp, Artificial Sequence
  Chr13_2 Reverse Primer
gaccattttccagcctttca

SEQ ID NO: 14017 - DNA, 20 bp, Artificial Sequence
  Chr13_2 Reverse Primer
ctagtcctggggaccctttc

SEQ ID NO: 14018 - DNA, 23 bp, Artificial Sequence
  Chr13_2 Reverse Primer
tccatgtatcctgacaatcactg

SEQ ID NO: 14019 - DNA, 21 bp, Artificial Sequence
  Chr13_2 Reverse Primer
ccagaaagaggaaacaggatg

SEQ ID NO: 14020 - DNA, 20 bp, Artificial Sequence
  Chr13_2 Reverse Primer
tttgtcttgggtgatggatg

SEQ ID NO: 14021 - DNA, 22 bp, Artificial Sequence
  Chr13_2 Reverse Primer
aaaatctcatgtttccctttgc

SEQ ID NO: 14022 - DNA, 23 bp, Artificial Sequence
  Chr13_2 Reverse Primer
tgtgtcaggagtgagacattgtt

SEQ ID NO: 14023 - DNA, 20 bp, Artificial Sequence
  Chr13_2 Reverse Primer
cttccatggctcaattgctt

SEQ ID NO: 14024 - DNA, 20 bp, Artificial Sequence
  Chr13_2 Reverse Primer
tgtgttgtctaggcattggg

SEQ ID NO: 14025 - DNA, 22 bp, Artificial Sequence
  Chr13_2 Reverse Primer
gaaaaagtggattttggaaagc

SEQ ID NO: 14026 - DNA, 20 bp, Artificial Sequence
  Chr13_2 Reverse Primer
ggcatgcaaagtccactgta

SEQ ID NO: 14027 - DNA, 23 bp, Artificial Sequence
  Chr13_2 Reverse Primer
tgcaaattaagtgtggagtatgg

SEQ ID NO: 14028 - DNA, 20 bp, Artificial Sequence
  Chr13_2 Reverse Primer
tctgcaccagcagtctaagc

SEQ ID NO: 14029 - DNA, 20 bp, Artificial Sequence
  Chr13_2 Reverse Primer
ggattggatgagctccaaaa

SEQ ID NO: 14030 - DNA, 22 bp, Artificial Sequence
  Chr13_2 Reverse Primer
ccatcattgtgggaataaaaca

SEQ ID NO: 14031 - DNA, 20 bp, Artificial Sequence
  Chr13_2 Reverse Primer
cctggaagcatgtacgacaa

SEQ ID NO: 14032 - DNA, 20 bp, Artificial Sequence
  Chr13_2 Reverse Primer
ggcctcgattatgaaaagca

SEQ ID NO: 14033 - DNA, 20 bp, Artificial Sequence
  Chr13_3 Forward Primer
gccaagggtaggagaagaca

SEQ ID NO: 14034 - DNA, 20 bp, Artificial Sequence
  Chr13_3 Forward Primer
ttccagaaagaaagccctca

SEQ ID NO: 14035 - DNA, 20 bp, Artificial Sequence
  Chr13_3 Forward Primer
ccactgccctaggatatggt

SEQ ID NO: 14036 - DNA, 20 bp, Artificial Sequence
  Chr13_3 Forward Primer
caggagcttggagaaagcat

SEQ ID NO: 14037 - DNA, 20 bp, Artificial Sequence
  Chr13_3 Forward Primer
gactgtaatgacccacggct

SEQ ID NO: 14038 - DNA, 20 bp, Artificial Sequence
  Chr13_3 Forward Primer
gtgatgccattctgggctat

SEQ ID NO: 14039 - DNA, 20 bp, Artificial Sequence
  Chr13_3 Forward Primer
tggaatgaggatggtggagt

SEQ ID NO: 14040 - DNA, 22 bp, Artificial Sequence
  Chr13_3 Forward Primer
ttggtgtcttgctacaatttca

SEQ ID NO: 14041 - DNA, 20 bp, Artificial Sequence
  Chr13_3 Forward Primer
catccagcaagcaggtcata

SEQ ID NO: 14042 - DNA, 20 bp, Artificial Sequence
  Chr13_3 Forward Primer
caatcataccacctccctgg

SEQ ID NO: 14043 - DNA, 20 bp, Artificial Sequence
  Chr13_3 Forward Primer
caggagaagggactgatcca

SEQ ID NO: 14044 - DNA, 20 bp, Artificial Sequence
  Chr13_3 Forward Primer
atacctgaagggagcaaggg

SEQ ID NO: 14045 - DNA, 20 bp, Artificial Sequence
  Chr13_3 Forward Primer
tcattagctgaagctgccct

SEQ ID NO: 14046 - DNA, 20 bp, Artificial Sequence
  Chr13_3 Forward Primer
aggtgctctctgtggctgat

SEQ ID NO: 14047 - DNA, 20 bp, Artificial Sequence
  Chr13_3 Forward Primer
aggctgcttggctagtgatg

SEQ ID NO: 14048 - DNA, 20 bp, Artificial Sequence
  Chr13_3 Forward Primer
tgagctggtgagaggatgaa

SEQ ID NO: 14049 - DNA, 20 bp, Artificial Sequence
  Chr13_3 Forward Primer
gacgcttgggtttctgttgt

SEQ ID NO: 14050 - DNA, 20 bp, Artificial Sequence
  Chr13_3 Forward Primer
acttgtgctaatggttgggg

SEQ ID NO: 14051 - DNA, 20 bp, Artificial Sequence
  Chr13_3 Forward Primer
gttatgtgatgggggtctgg

SEQ ID NO: 14052 - DNA, 20 bp, Artificial Sequence
  Chr13_3 Forward Primer
cacggtgggtattgagagtg

SEQ ID NO: 14053 - DNA, 22 bp, Artificial Sequence
  Chr13_3 Forward Primer
tcctgtcatcattttgttttgc

SEQ ID NO: 14054 - DNA, 19 bp, Artificial Sequence
  Chr13_3 Forward Primer
cctctctgctgttgcccat

SEQ ID NO: 14055 - DNA, 20 bp, Artificial Sequence
  Chr13_3 Forward Primer
ccgacgtttgtagatggctt

SEQ ID NO: 14056 - DNA, 20 bp, Artificial Sequence
  Chr13_3 Forward Primer
ctgtcacggtgcttctcaaa

SEQ ID NO: 14057 - DNA, 20 bp, Artificial Sequence
  Chr13_3 Forward Primer
aagaaagagcctggtgagcc

SEQ ID NO: 14058 - DNA, 20 bp, Artificial Sequence
  Chr13_3 Forward Primer
cctgatacccttgctggaaa

SEQ ID NO: 14059 - DNA, 20 bp, Artificial Sequence
  Chr13_3 Forward Primer
aaccttgaccacacagcaca

SEQ ID NO: 14060 - DNA, 20 bp, Artificial Sequence
  Chr13_3 Forward Primer
aacagggtggcagtggttag

SEQ ID NO: 14061 - DNA, 20 bp, Artificial Sequence
  Chr13_3 Forward Primer
ctgggactatgggtgtgagc

SEQ ID NO: 14062 - DNA, 18 bp, Artificial Sequence
  Chr13_3 Forward Primer
acacagctgatgttggcg

SEQ ID NO: 14063 - DNA, 20 bp, Artificial Sequence
  Chr13_3 Forward Primer
gccatgcaattaaagaggga

SEQ ID NO: 14064 - DNA, 22 bp, Artificial Sequence
  Chr13_3 Forward Primer
cagtgagagtaagggagaggga

SEQ ID NO: 14065 - DNA, 23 bp, Artificial Sequence
  Chr13_3 Forward Primer
caccaacacttgatattgacagc

SEQ ID NO: 14066 - DNA, 20 bp, Artificial Sequence
  Chr13_3 Forward Primer
tctatcctctagccagccca

SEQ ID NO: 14067 - DNA, 25 bp, Artificial Sequence
  Chr13_3 Forward Primer
ccctgtaaatatgtccatctgtttt

SEQ ID NO: 14068 - DNA, 25 bp, Artificial Sequence
  Chr13_3 Forward Primer
tccttcagaatttgtttaatgaaga

SEQ ID NO: 14069 - DNA, 23 bp, Artificial Sequence
  Chr13_3 Forward Primer
ttctcaacatattggtacagcca

SEQ ID NO: 14070 - DNA, 20 bp, Artificial Sequence
  Chr13_3 Forward Primer
cggtgtgcaaacataacagg

SEQ ID NO: 14071 - DNA, 21 bp, Artificial Sequence
  Chr13_3 Forward Primer
cctcctaaatggtctccttcc

SEQ ID NO: 14072 - DNA, 21 bp, Artificial Sequence
  Chr13_3 Forward Primer
gcttctaatgctcattgctgg

SEQ ID NO: 14073 - DNA, 20 bp, Artificial Sequence
  Chr13_3 Forward Primer
gcattcaaggtttcagggac

SEQ ID NO: 14074 - DNA, 20 bp, Artificial Sequence
  Chr13_3 Forward Primer
tcagggctctgtatgtcagc

SEQ ID NO: 14075 - DNA, 20 bp, Artificial Sequence
  Chr13_3 Forward Primer
ttctgcttgcttcttagcca

SEQ ID NO: 14076 - DNA, 20 bp, Artificial Sequence
  Chr13_3 Forward Primer
ttggttgcattcactttcca

SEQ ID NO: 14077 - DNA, 19 bp, Artificial Sequence
  Chr13_3 Forward Primer
acaaccatgcctccctagc

SEQ ID NO: 14078 - DNA, 20 bp, Artificial Sequence
  Chr13_3 Forward Primer
aatggtcacctggcaaagac

SEQ ID NO: 14079 - DNA, 20 bp, Artificial Sequence
  Chr13_3 Forward Primer
agtcctcaccttgctcctga

SEQ ID NO: 14080 - DNA, 20 bp, Artificial Sequence
  Chr13_3 Forward Primer
gcctatcacttctcacccga

SEQ ID NO: 14081 - DNA, 20 bp, Artificial Sequence
  Chr13_3 Forward Primer
tgtgtccctcaagactcagc

SEQ ID NO: 14082 - DNA, 20 bp, Artificial Sequence
  Chr13_3 Forward Primer
gaaacaccacaggggaaaaa

SEQ ID NO: 14083 - DNA, 20 bp, Artificial Sequence
  Chr13_3 Forward Primer
agcatttcctgctcctcaaa

SEQ ID NO: 14084 - DNA, 20 bp, Artificial Sequence
  Chr13_3 Forward Primer
ccaaatcaaaggttccttgc

SEQ ID NO: 14085 - DNA, 19 bp, Artificial Sequence
  Chr13_3 Forward Primer
tgcctcgctagccatacag

SEQ ID NO: 14086 - DNA, 20 bp, Artificial Sequence
  Chr13_3 Forward Primer
ggtacctggcctgtaatcca

SEQ ID NO: 14087 - DNA, 20 bp, Artificial Sequence
  Chr13_3 Forward Primer
atgcctggtgcatggtaaat

SEQ ID NO: 14088 - DNA, 20 bp, Artificial Sequence
  Chr13_3 Forward Primer
ttattgactccaaccccctt

SEQ ID NO: 14089 - DNA, 21 bp, Artificial Sequence
  Chr13_3 Forward Primer
tcagagcagtggacctgactt

SEQ ID NO: 14090 - DNA, 20 bp, Artificial Sequence
  Chr13_3 Forward Primer
taagggtctctttctgccca

SEQ ID NO: 14091 - DNA, 20 bp, Artificial Sequence
  Chr13_3 Forward Primer
tctaatgcctggtgtgcatc

SEQ ID NO: 14092 - DNA, 25 bp, Artificial Sequence
  Chr13_3 Forward Primer
aagatccaatcattcaatatcatgt

SEQ ID NO: 14093 - DNA, 20 bp, Artificial Sequence
  Chr13_3 Forward Primer
tggtggattaaaaacggcat

SEQ ID NO: 14094 - DNA, 20 bp, Artificial Sequence
  Chr13_3 Forward Primer
caatgtgaaagcaaggggag

SEQ ID NO: 14095 - DNA, 20 bp, Artificial Sequence
  Chr13_3 Forward Primer
tttcataggttgcagcatcg

SEQ ID NO: 14096 - DNA, 20 bp, Artificial Sequence
  Chr13_3 Forward Primer
ttcccatgggttgcttttta

SEQ ID NO: 14097 - DNA, 20 bp, Artificial Sequence
  Chr13_3 Forward Primer
cagcacactagaagctcccc

SEQ ID NO: 14098 - DNA, 20 bp, Artificial Sequence
  Chr13_3 Forward Primer
ttgagcactgggaaaaatcc

SEQ ID NO: 14099 - DNA, 20 bp, Artificial Sequence
  Chr13_3 Forward Primer
agataggcctgttgccctct

SEQ ID NO: 14100 - DNA, 20 bp, Artificial Sequence
  Chr13_3 Forward Primer
tggatggcactttgaaaaca

SEQ ID NO: 14101 - DNA, 20 bp, Artificial Sequence
  Chr13_3 Forward Primer
tgccacctaccccttcatac

SEQ ID NO: 14102 - DNA, 20 bp, Artificial Sequence
  Chr13_3 Forward Primer
ccagattgtgtcggttttca

SEQ ID NO: 14103 - DNA, 20 bp, Artificial Sequence
  Chr13_3 Forward Primer
aactgcattttgttggcaca

SEQ ID NO: 14104 - DNA, 20 bp, Artificial Sequence
  Chr13_3 Forward Primer
ttgatgatgtcaggaaccca

SEQ ID NO: 14105 - DNA, 20 bp, Artificial Sequence
  Chr13_3 Forward Primer
gaaccgacctcattctgcat

SEQ ID NO: 14106 - DNA, 20 bp, Artificial Sequence
  Chr13_3 Forward Primer
ctgtgccccatctttctcag

SEQ ID NO: 14107 - DNA, 20 bp, Artificial Sequence
  Chr13_3 Forward Primer
gggcaattgtcctgaagaga

SEQ ID NO: 14108 - DNA, 25 bp, Artificial Sequence
  Chr13_3 Forward Primer
tgacacatttccaattgtttagttc

SEQ ID NO: 14109 - DNA, 20 bp, Artificial Sequence
  Chr13_3 Forward Primer
gaagggctgagagcaacact

SEQ ID NO: 14110 - DNA, 20 bp, Artificial Sequence
  Chr13_3 Forward Primer
ttttctaactgcgcccatct

SEQ ID NO: 14111 - DNA, 20 bp, Artificial Sequence
  Chr13_3 Forward Primer
tccaaactcactgtccctcc

SEQ ID NO: 14112 - DNA, 20 bp, Artificial Sequence
  Chr13_3 Forward Primer
ccgcaccctatgactttagc

SEQ ID NO: 14113 - DNA, 20 bp, Artificial Sequence
  Chr13_3 Forward Primer
ggatggctgtggatttcagt

SEQ ID NO: 14114 - DNA, 20 bp, Artificial Sequence
  Chr13_3 Forward Primer
gacctggtacaccgtatggc

SEQ ID NO: 14115 - DNA, 20 bp, Artificial Sequence
  Chr13_3 Forward Primer
gatgcttttcctttttccca

SEQ ID NO: 14116 - DNA, 20 bp, Artificial Sequence
  Chr13_3 Forward Primer
caggacctcgtatcactggc

SEQ ID NO: 14117 - DNA, 20 bp, Artificial Sequence
  Chr13_3 Forward Primer
gtggggacattggctaactt

SEQ ID NO: 14118 - DNA, 21 bp, Artificial Sequence
  Chr13_3 Forward Primer
tctctgtgtctcaggctcctc

SEQ ID NO: 14119 - DNA, 20 bp, Artificial Sequence
  Chr13_3 Forward Primer
cctccaccttaccactgagc

SEQ ID NO: 14120 - DNA, 20 bp, Artificial Sequence
  Chr13_3 Forward Primer
ccaataggcagaggggtaca

SEQ ID NO: 14121 - DNA, 20 bp, Artificial Sequence
  Chr13_3 Forward Primer
aaagtcacactggggtggag

SEQ ID NO: 14122 - DNA, 20 bp, Artificial Sequence
  Chr13_3 Forward Primer
ctgagggaaaagaatggcag

SEQ ID NO: 14123 - DNA, 20 bp, Artificial Sequence
  Chr13_3 Forward Primer
aatcttgttggcttgacgct

SEQ ID NO: 14124 - DNA, 20 bp, Artificial Sequence
  Chr13_3 Forward Primer
agaggaaaaaggaagacggc

SEQ ID NO: 14125 - DNA, 20 bp, Artificial Sequence
  Chr13_3 Forward Primer
gcagagggcaagacaacaat

SEQ ID NO: 14126 - DNA, 20 bp, Artificial Sequence
  Chr13_3 Forward Primer
ttggcaaaaattccatcaga

SEQ ID NO: 14127 - DNA, 21 bp, Artificial Sequence
  Chr13_3 Forward Primer
gatcaccacctagctgatcca

SEQ ID NO: 14128 - DNA, 27 bp, Artificial Sequence
  Chr13_3 Forward Primer
tgtagctttcctaattcatctttattg

SEQ ID NO: 14129 - DNA, 20 bp, Artificial Sequence
  Chr13_3 Reverse Primer
aagaggttcaatgctttgcc

SEQ ID NO: 14130 - DNA, 20 bp, Artificial Sequence
  Chr13_3 Reverse Primer
cctccatccccaattcaact

SEQ ID NO: 14131 - DNA, 20 bp, Artificial Sequence
  Chr13_3 Reverse Primer
cacctccttttcaaaggctc

SEQ ID NO: 14132 - DNA, 20 bp, Artificial Sequence
  Chr13_3 Reverse Primer
agcgcaacatcatttgctta

SEQ ID NO: 14133 - DNA, 20 bp, Artificial Sequence
  Chr13_3 Reverse Primer
gtgatctgagactccccagc

SEQ ID NO: 14134 - DNA, 20 bp, Artificial Sequence
  Chr13_3 Reverse Primer
tggctgtgtaccatgcattc

SEQ ID NO: 14135 - DNA, 20 bp, Artificial Sequence
  Chr13_3 Reverse Primer
tccaaccaaaggaagagacc

SEQ ID NO: 14136 - DNA, 20 bp, Artificial Sequence
  Chr13_3 Reverse Primer
gaaggttcggtgagcaatgt

SEQ ID NO: 14137 - DNA, 20 bp, Artificial Sequence
  Chr13_3 Reverse Primer
tcacgcagccgagtgtatag

SEQ ID NO: 14138 - DNA, 20 bp, Artificial Sequence
  Chr13_3 Reverse Primer
tacgtttttgagggcagagc

SEQ ID NO: 14139 - DNA, 25 bp, Artificial Sequence
  Chr13_3 Reverse Primer
tgctttatgggtttatagaaaatgt

SEQ ID NO: 14140 - DNA, 20 bp, Artificial Sequence
  Chr13_3 Reverse Primer
ggggagtagctttgtttccc

SEQ ID NO: 14141 - DNA, 20 bp, Artificial Sequence
  Chr13_3 Reverse Primer
aggattgcttccctgagttg

SEQ ID NO: 14142 - DNA, 20 bp, Artificial Sequence
  Chr13_3 Reverse Primer
agtcattggtgtctccccag

SEQ ID NO: 14143 - DNA, 26 bp, Artificial Sequence
  Chr13_3 Reverse Primer
gaaagtgaagcttttgttttatctga

SEQ ID NO: 14144 - DNA, 20 bp, Artificial Sequence
  Chr13_3 Reverse Primer
gtttcaacaggatggatggc

SEQ ID NO: 14145 - DNA, 20 bp, Artificial Sequence
  Chr13_3 Reverse Primer
caacccatagatgccttgct

SEQ ID NO: 14146 - DNA, 20 bp, Artificial Sequence
  Chr13_3 Reverse Primer
gggcttccctccaaaataac

SEQ ID NO: 14147 - DNA, 20 bp, Artificial Sequence
  Chr13_3 Reverse Primer
attggcagtcgtgggtctaa

SEQ ID NO: 14148 - DNA, 20 bp, Artificial Sequence
  Chr13_3 Reverse Primer
tggtgatttggggagttctt

SEQ ID NO: 14149 - DNA, 23 bp, Artificial Sequence
  Chr13_3 Reverse Primer
aagcctagagaaaccttcaagtg

SEQ ID NO: 14150 - DNA, 21 bp, Artificial Sequence
  Chr13_3 Reverse Primer
tttacaaaaataagggtgggg

SEQ ID NO: 14151 - DNA, 20 bp, Artificial Sequence
  Chr13_3 Reverse Primer
gatcccaggtgtgtttcctg

SEQ ID NO: 14152 - DNA, 20 bp, Artificial Sequence
  Chr13_3 Reverse Primer
aaccagaaagacttgtgggg

SEQ ID NO: 14153 - DNA, 20 bp, Artificial Sequence
  Chr13_3 Reverse Primer
ctgacctggccctaaaacag

SEQ ID NO: 14154 - DNA, 20 bp, Artificial Sequence
  Chr13_3 Reverse Primer
gctatgctccagagtgaccc

SEQ ID NO: 14155 - DNA, 20 bp, Artificial Sequence
  Chr13_3 Reverse Primer
ctctgcagcttggtacctcc

SEQ ID NO: 14156 - DNA, 20 bp, Artificial Sequence
  Chr13_3 Reverse Primer
atgggattgggtagggagtc

SEQ ID NO: 14157 - DNA, 20 bp, Artificial Sequence
  Chr13_3 Reverse Primer
ccctctacccgtcatcttga

SEQ ID NO: 14158 - DNA, 20 bp, Artificial Sequence
  Chr13_3 Reverse Primer
gcaaagaatcttgcttcgct

SEQ ID NO: 14159 - DNA, 20 bp, Artificial Sequence
  Chr13_3 Reverse Primer
tggattcttgcatgatggtg

SEQ ID NO: 14160 - DNA, 20 bp, Artificial Sequence
  Chr13_3 Reverse Primer
ttggcagggagaaggtaatg

SEQ ID NO: 14161 - DNA, 24 bp, Artificial Sequence
  Chr13_3 Reverse Primer
tgtctttgtgcctaatagttttga

SEQ ID NO: 14162 - DNA, 22 bp, Artificial Sequence
  Chr13_3 Reverse Primer
tgcagtaggagctgtttcaaga

SEQ ID NO: 14163 - DNA, 24 bp, Artificial Sequence
  Chr13_3 Reverse Primer
cctggaaaatgaattaaccagaat

SEQ ID NO: 14164 - DNA, 21 bp, Artificial Sequence
  Chr13_3 Reverse Primer
tgttggttgagcatgaagaga

SEQ ID NO: 14165 - DNA, 20 bp, Artificial Sequence
  Chr13_3 Reverse Primer
tccacatcaccatccaagaa

SEQ ID NO: 14166 - DNA, 20 bp, Artificial Sequence
  Chr13_3 Reverse Primer
agaggatttgcccttggatt

SEQ ID NO: 14167 - DNA, 20 bp, Artificial Sequence
  Chr13_3 Reverse Primer
ggcaaatagcctcattcctg

SEQ ID NO: 14168 - DNA, 20 bp, Artificial Sequence
  Chr13_3 Reverse Primer
tgtgcacagccaaagtacaa

SEQ ID NO: 14169 - DNA, 20 bp, Artificial Sequence
  Chr13_3 Reverse Primer
ccagctgaagaaaggcctaa

SEQ ID NO: 14170 - DNA, 21 bp, Artificial Sequence
  Chr13_3 Reverse Primer
gggaattgaatgcaataagga

SEQ ID NO: 14171 - DNA, 25 bp, Artificial Sequence
  Chr13_3 Reverse Primer
cacagaaaacataaaataacatggg

SEQ ID NO: 14172 - DNA, 20 bp, Artificial Sequence
  Chr13_3 Reverse Primer
atcacaaaggagccaaatgc

SEQ ID NO: 14173 - DNA, 20 bp, Artificial Sequence
  Chr13_3 Reverse Primer
ggacgcctctcaaagacaac

SEQ ID NO: 14174 - DNA, 20 bp, Artificial Sequence
  Chr13_3 Reverse Primer
agaacagccgagtcaaggaa

SEQ ID NO: 14175 - DNA, 20 bp, Artificial Sequence
  Chr13_3 Reverse Primer
gacactgaatgcgagggaag

SEQ ID NO: 14176 - DNA, 20 bp, Artificial Sequence
  Chr13_3 Reverse Primer
accagacagagaagggtgga

SEQ ID NO: 14177 - DNA, 20 bp, Artificial Sequence
  Chr13_3 Reverse Primer
gcactgagggcacagagatt

SEQ ID NO: 14178 - DNA, 20 bp, Artificial Sequence
  Chr13_3 Reverse Primer
gcaccatgcatgctctaaca

SEQ ID NO: 14179 - DNA, 20 bp, Artificial Sequence
  Chr13_3 Reverse Primer
tcttctgccagtcctgtgtg

SEQ ID NO: 14180 - DNA, 20 bp, Artificial Sequence
  Chr13_3 Reverse Primer
tatccaaatgccaacacagc

SEQ ID NO: 14181 - DNA, 24 bp, Artificial Sequence
  Chr13_3 Reverse Primer
tcaggtactttacattcattgtgc

SEQ ID NO: 14182 - DNA, 20 bp, Artificial Sequence
  Chr13_3 Reverse Primer
tgtcaccaagatcacctcca

SEQ ID NO: 14183 - DNA, 23 bp, Artificial Sequence
  Chr13_3 Reverse Primer
tcttcctctgtggagatctaaaa

SEQ ID NO: 14184 - DNA, 20 bp, Artificial Sequence
  Chr13_3 Reverse Primer
tcaaggaatggctcttccac

SEQ ID NO: 14185 - DNA, 25 bp, Artificial Sequence
  Chr13_3 Reverse Primer
ttcacagtgctacaaagggatataa

SEQ ID NO: 14186 - DNA, 20 bp, Artificial Sequence
  Chr13_3 Reverse Primer
atgcacaagtgcacagaggt

SEQ ID NO: 14187 - DNA, 20 bp, Artificial Sequence
  Chr13_3 Reverse Primer
cctttccctggacattgaga

SEQ ID NO: 14188 - DNA, 24 bp, Artificial Sequence
  Chr13_3 Reverse Primer
aaagatctaatccgtatccagaga

SEQ ID NO: 14189 - DNA, 20 bp, Artificial Sequence
  Chr13_3 Reverse Primer
aaaggaagaaggttgggagc

SEQ ID NO: 14190 - DNA, 20 bp, Artificial Sequence
  Chr13_3 Reverse Primer
aaaataacctgggcccaaac

SEQ ID NO: 14191 - DNA, 20 bp, Artificial Sequence
  Chr13_3 Reverse Primer
ggaagcacagctggagacat

SEQ ID NO: 14192 - DNA, 20 bp, Artificial Sequence
  Chr13_3 Reverse Primer
ggagcagcatactgggaaga

SEQ ID NO: 14193 - DNA, 20 bp, Artificial Sequence
  Chr13_3 Reverse Primer
gcaaattctctgagggagga

SEQ ID NO: 14194 - DNA, 20 bp, Artificial Sequence
  Chr13_3 Reverse Primer
aagggaatggccagctttat

SEQ ID NO: 14195 - DNA, 20 bp, Artificial Sequence
  Chr13_3 Reverse Primer
aacatggtccttctccctga

SEQ ID NO: 14196 - DNA, 22 bp, Artificial Sequence
  Chr13_3 Reverse Primer
gagatttcagagactgccagaa

SEQ ID NO: 14197 - DNA, 20 bp, Artificial Sequence
  Chr13_3 Reverse Primer
gttcatttgctgggtgacct

SEQ ID NO: 14198 - DNA, 20 bp, Artificial Sequence
  Chr13_3 Reverse Primer
cctgcagttttgatcagggt

SEQ ID NO: 14199 - DNA, 20 bp, Artificial Sequence
  Chr13_3 Reverse Primer
ttgcatccactaccatttgc

SEQ ID NO: 14200 - DNA, 20 bp, Artificial Sequence
  Chr13_3 Reverse Primer
cccaggacctacaccaagaa

SEQ ID NO: 14201 - DNA, 20 bp, Artificial Sequence
  Chr13_3 Reverse Primer
tctctgctggcttgttttga

SEQ ID NO: 14202 - DNA, 20 bp, Artificial Sequence
  Chr13_3 Reverse Primer
cgcaaatgaatttagcggat

SEQ ID NO: 14203 - DNA, 20 bp, Artificial Sequence
  Chr13_3 Reverse Primer
gttctgttgttgccaccctt

SEQ ID NO: 14204 - DNA, 20 bp, Artificial Sequence
  Chr13_3 Reverse Primer
gcctgaatttgctcttctgg

SEQ ID NO: 14205 - DNA, 21 bp, Artificial Sequence
  Chr13_3 Reverse Primer
tcctcccacgtagaacatctg

SEQ ID NO: 14206 - DNA, 20 bp, Artificial Sequence
  Chr13_3 Reverse Primer
ggccactacaataggagcca

SEQ ID NO: 14207 - DNA, 20 bp, Artificial Sequence
  Chr13_3 Reverse Primer
aggcaagtttagtgggctga

SEQ ID NO: 14208 - DNA, 23 bp, Artificial Sequence
  Chr13_3 Reverse Primer
tcacctgttctttctactcaggc

SEQ ID NO: 14209 - DNA, 20 bp, Artificial Sequence
  Chr13_3 Reverse Primer
ttcccgaagaggtcaagaga

SEQ ID NO: 14210 - DNA, 23 bp, Artificial Sequence
  Chr13_3 Reverse Primer
ttttccagaaggtaatttgactg

SEQ ID NO: 14211 - DNA, 21 bp, Artificial Sequence
  Chr13_3 Reverse Primer
taggtgcggtagtgcaaaagt

SEQ ID NO: 14212 - DNA, 20 bp, Artificial Sequence
  Chr13_3 Reverse Primer
tacctggccttacaggcatt

SEQ ID NO: 14213 - DNA, 23 bp, Artificial Sequence
  Chr13_3 Reverse Primer
ttggattcccttctaagttctca

SEQ ID NO: 14214 - DNA, 22 bp, Artificial Sequence
  Chr13_3 Reverse Primer
cccaaagtctaaaagccttcaa

SEQ ID NO: 14215 - DNA, 20 bp, Artificial Sequence
  Chr13_3 Reverse Primer
tcacacacatcccagaagga

SEQ ID NO: 14216 - DNA, 20 bp, Artificial Sequence
  Chr13_3 Reverse Primer
ctcacaccagcttctgatgg

SEQ ID NO: 14217 - DNA, 20 bp, Artificial Sequence
  Chr13_3 Reverse Primer
ctctggcccaacaagtcatt

SEQ ID NO: 14218 - DNA, 20 bp, Artificial Sequence
  Chr13_3 Reverse Primer
catatggaatgcattgtggg

SEQ ID NO: 14219 - DNA, 20 bp, Artificial Sequence
  Chr13_3 Reverse Primer
gctggcaggagctctgtact

SEQ ID NO: 14220 - DNA, 20 bp, Artificial Sequence
  Chr13_3 Reverse Primer
cttgggatcatgccagaaat

SEQ ID NO: 14221 - DNA, 20 bp, Artificial Sequence
  Chr13_3 Reverse Primer
gaaggaggacccagacaaca

SEQ ID NO: 14222 - DNA, 20 bp, Artificial Sequence
  Chr13_3 Reverse Primer
acccctctccagtgagatcc

SEQ ID NO: 14223 - DNA, 22 bp, Artificial Sequence
  Chr13_3 Reverse Primer
aaaaattgaagtgggtcaaaaa

SEQ ID NO: 14224 - DNA, 23 bp, Artificial Sequence
  Chr13_3 Reverse Primer
tgaatgctttgatttattgtgga

SEQ ID NO: 14225 - DNA, 20 bp, Artificial Sequence
  Chr13_4 Forward Primer
aggctgagcaacaaagtgct

SEQ ID NO: 14226 - DNA, 21 bp, Artificial Sequence
  Chr13_4 Forward Primer
gaaattcatggctgaaatgga

SEQ ID NO: 14227 - DNA, 21 bp, Artificial Sequence
  Chr13_4 Forward Primer
ttttcaagtgtttggagacgc

SEQ ID NO: 14228 - DNA, 21 bp, Artificial Sequence
  Chr13_4 Forward Primer
agtctgtgcttctttgggtca

SEQ ID NO: 14229 - DNA, 20 bp, Artificial Sequence
  Chr13_4 Forward Primer
agccgcaagtaatgttccat

SEQ ID NO: 14230 - DNA, 20 bp, Artificial Sequence
  Chr13_4 Forward Primer
atggtacctggcatgcaata

SEQ ID NO: 14231 - DNA, 21 bp, Artificial Sequence
  Chr13_4 Forward Primer
ttccgtcaacaaacatttgag

SEQ ID NO: 14232 - DNA, 20 bp, Artificial Sequence
  Chr13_4 Forward Primer
cttcaagcccaagagtggat

SEQ ID NO: 14233 - DNA, 20 bp, Artificial Sequence
  Chr13_4 Forward Primer
cccagcttctttttggactg

SEQ ID NO: 14234 - DNA, 20 bp, Artificial Sequence
  Chr13_4 Forward Primer
aacattgtcctctggggttg

SEQ ID NO: 14235 - DNA, 20 bp, Artificial Sequence
  Chr13_4 Forward Primer
cagcactcagtgtcctcaca

SEQ ID NO: 14236 - DNA, 20 bp, Artificial Sequence
  Chr13_4 Forward Primer
gatctgatccccaatgccta

SEQ ID NO: 14237 - DNA, 20 bp, Artificial Sequence
  Chr13_4 Forward Primer
gatgagggggttggattttt

SEQ ID NO: 14238 - DNA, 20 bp, Artificial Sequence
  Chr13_4 Forward Primer
agtgccaagcacagttctga

SEQ ID NO: 14239 - DNA, 20 bp, Artificial Sequence
  Chr13_4 Forward Primer
gcttcaagtgatcccagagc

SEQ ID NO: 14240 - DNA, 20 bp, Artificial Sequence
  Chr13_4 Forward Primer
ggctttgagaaagcatggag

SEQ ID NO: 14241 - DNA, 20 bp, Artificial Sequence
  Chr13_4 Forward Primer
cttgtgcaacttcagcaagc

SEQ ID NO: 14242 - DNA, 20 bp, Artificial Sequence
  Chr13_4 Forward Primer
attgaccttggcatttcctg

SEQ ID NO: 14243 - DNA, 20 bp, Artificial Sequence
  Chr13_4 Forward Primer
agtcagggcctgggttatct

SEQ ID NO: 14244 - DNA, 22 bp, Artificial Sequence
  Chr13_4 Forward Primer
tttgtaccttctttttctcccg

SEQ ID NO: 14245 - DNA, 22 bp, Artificial Sequence
  Chr13_4 Forward Primer
tgctcatagatcccttagcaca

SEQ ID NO: 14246 - DNA, 20 bp, Artificial Sequence
  Chr13_4 Forward Primer
ctatcccccaccctgagttt

SEQ ID NO: 14247 - DNA, 20 bp, Artificial Sequence
  Chr13_4 Forward Primer
aggtggcataatttgggaag

SEQ ID NO: 14248 - DNA, 20 bp, Artificial Sequence
  Chr13_4 Forward Primer
tggctctttccaaagcctta

SEQ ID NO: 14249 - DNA, 20 bp, Artificial Sequence
  Chr13_4 Forward Primer
gggcgaggttaactctgtca

SEQ ID NO: 14250 - DNA, 20 bp, Artificial Sequence
  Chr13_4 Forward Primer
tccaccgttggacagatttt

SEQ ID NO: 14251 - DNA, 21 bp, Artificial Sequence
  Chr13_4 Forward Primer
agaggtgaagatatgctgcca

SEQ ID NO: 14252 - DNA, 20 bp, Artificial Sequence
  Chr13_4 Forward Primer
ccagggactggagtcagaga

SEQ ID NO: 14253 - DNA, 20 bp, Artificial Sequence
  Chr13_4 Forward Primer
cgatttgggggatatttttg

SEQ ID NO: 14254 - DNA, 20 bp, Artificial Sequence
  Chr13_4 Forward Primer
gtcctcctcccacctcactt

SEQ ID NO: 14255 - DNA, 20 bp, Artificial Sequence
  Chr13_4 Forward Primer
tttgtcctttgagggatgct

SEQ ID NO: 14256 - DNA, 22 bp, Artificial Sequence
  Chr13_4 Forward Primer
tggagtttagctaggagattgc

SEQ ID NO: 14257 - DNA, 20 bp, Artificial Sequence
  Chr13_4 Forward Primer
tctgccctgtggtccttatc

SEQ ID NO: 14258 - DNA, 20 bp, Artificial Sequence
  Chr13_4 Forward Primer
atcttgcagaatccaaggga

SEQ ID NO: 14259 - DNA, 20 bp, Artificial Sequence
  Chr13_4 Forward Primer
tctggctagggtcagctgtt

SEQ ID NO: 14260 - DNA, 21 bp, Artificial Sequence
  Chr13_4 Forward Primer
gcggaataatgaacactcaca

SEQ ID NO: 14261 - DNA, 20 bp, Artificial Sequence
  Chr13_4 Forward Primer
agcactggtgagtagacccc

SEQ ID NO: 14262 - DNA, 20 bp, Artificial Sequence
  Chr13_4 Forward Primer
tcacgatacaatgccacctc

SEQ ID NO: 14263 - DNA, 20 bp, Artificial Sequence
  Chr13_4 Forward Primer
aaggaaggatgagggcattt

SEQ ID NO: 14264 - DNA, 20 bp, Artificial Sequence
  Chr13_4 Forward Primer
tcgcttgtattgcaggattg

SEQ ID NO: 14265 - DNA, 20 bp, Artificial Sequence
  Chr13_4 Forward Primer
ggaggaattcgtaagagccc

SEQ ID NO: 14266 - DNA, 20 bp, Artificial Sequence
  Chr13_4 Forward Primer
ttgtagcaaaagcagcatgg

SEQ ID NO: 14267 - DNA, 20 bp, Artificial Sequence
  Chr13_4 Forward Primer
agcagcttcttggcattagc

SEQ ID NO: 14268 - DNA, 20 bp, Artificial Sequence
  Chr13_4 Forward Primer
gccattttcatgggaatcag

SEQ ID NO: 14269 - DNA, 20 bp, Artificial Sequence
  Chr13_4 Forward Primer
taaatgatggtggtgcctga

SEQ ID NO: 14270 - DNA, 20 bp, Artificial Sequence
  Chr13_4 Forward Primer
agaggagggtgagacagcaa

SEQ ID NO: 14271 - DNA, 20 bp, Artificial Sequence
  Chr13_4 Forward Primer
cagcagttagcacgcaacac

SEQ ID NO: 14272 - DNA, 24 bp, Artificial Sequence
  Chr13_4 Forward Primer
ccctgtcagaaatttagaatgtga

SEQ ID NO: 14273 - DNA, 20 bp, Artificial Sequence
  Chr13_4 Forward Primer
gacgaatggtcacatgcctt

SEQ ID NO: 14274 - DNA, 20 bp, Artificial Sequence
  Chr13_4 Forward Primer
cccagctcctccactgacta

SEQ ID NO: 14275 - DNA, 20 bp, Artificial Sequence
  Chr13_4 Forward Primer
ggcatgttgtaagcacctca

SEQ ID NO: 14276 - DNA, 22 bp, Artificial Sequence
  Chr13_4 Forward Primer
ggaaagacattttccagtgttg

SEQ ID NO: 14277 - DNA, 20 bp, Artificial Sequence
  Chr13_4 Forward Primer
cagccaaaatgtggcataaa

SEQ ID NO: 14278 - DNA, 20 bp, Artificial Sequence
  Chr13_4 Forward Primer
gcatggccatagtctccttc

SEQ ID NO: 14279 - DNA, 20 bp, Artificial Sequence
  Chr13_4 Forward Primer
tttttgcaaacaatccacca

SEQ ID NO: 14280 - DNA, 21 bp, Artificial Sequence
  Chr13_4 Forward Primer
ccatttctctattagggggca

SEQ ID NO: 14281 - DNA, 22 bp, Artificial Sequence
  Chr13_4 Forward Primer
gggaagttcctaggagatctga

SEQ ID NO: 14282 - DNA, 20 bp, Artificial Sequence
  Chr13_4 Forward Primer
acttggctaggttctggggt

SEQ ID NO: 14283 - DNA, 20 bp, Artificial Sequence
  Chr13_4 Forward Primer
gtttcagggatttgggaagc

SEQ ID NO: 14284 - DNA, 20 bp, Artificial Sequence
  Chr13_4 Forward Primer
caaccaaaccctctttgcat

SEQ ID NO: 14285 - DNA, 20 bp, Artificial Sequence
  Chr13_4 Forward Primer
gccgctattttagttctgcc

SEQ ID NO: 14286 - DNA, 20 bp, Artificial Sequence
  Chr13_4 Forward Primer
cgttgagattttgcctcagc

SEQ ID NO: 14287 - DNA, 20 bp, Artificial Sequence
  Chr13_4 Forward Primer
ccagtgataggagcagggaa

SEQ ID NO: 14288 - DNA, 20 bp, Artificial Sequence
  Chr13_4 Forward Primer
gagctgccctactgcttgac

SEQ ID NO: 14289 - DNA, 20 bp, Artificial Sequence
  Chr13_4 Forward Primer
cctgcctccctgtttaggag

SEQ ID NO: 14290 - DNA, 25 bp, Artificial Sequence
  Chr13_4 Forward Primer
tgcttgtagatacatatgccaaaaa

SEQ ID NO: 14291 - DNA, 20 bp, Artificial Sequence
  Chr13_4 Forward Primer
tctttctccaccttcctccc

SEQ ID NO: 14292 - DNA, 20 bp, Artificial Sequence
  Chr13_4 Forward Primer
atctccccttctttcccaag

SEQ ID NO: 14293 - DNA, 20 bp, Artificial Sequence
  Chr13_4 Forward Primer
ccctgggcacattctgtaat

SEQ ID NO: 14294 - DNA, 20 bp, Artificial Sequence
  Chr13_4 Forward Primer
tctccagtcagcattgcatc

SEQ ID NO: 14295 - DNA, 20 bp, Artificial Sequence
  Chr13_4 Forward Primer
atgggactcaggaggaatga

SEQ ID NO: 14296 - DNA, 22 bp, Artificial Sequence
  Chr13_4 Forward Primer
ttgcaacacaagttgaaaagtc

SEQ ID NO: 14297 - DNA, 20 bp, Artificial Sequence
  Chr13_4 Forward Primer
ctcacctgcatcagtcagga

SEQ ID NO: 14298 - DNA, 20 bp, Artificial Sequence
  Chr13_4 Forward Primer
ttggtgacacttcaacaggg

SEQ ID NO: 14299 - DNA, 20 bp, Artificial Sequence
  Chr13_4 Forward Primer
gaaaatctcccccacctctc

SEQ ID NO: 14300 - DNA, 21 bp, Artificial Sequence
  Chr13_4 Forward Primer
ctttcatctgcaatccaggag

SEQ ID NO: 14301 - DNA, 20 bp, Artificial Sequence
  Chr13_4 Forward Primer
aaagctgcccatttgtttct

SEQ ID NO: 14302 - DNA, 20 bp, Artificial Sequence
  Chr13_4 Forward Primer
ggcagcactacctgaagcat

SEQ ID NO: 14303 - DNA, 20 bp, Artificial Sequence
  Chr13_4 Forward Primer
gtggtgtggcacaatgtgtt

SEQ ID NO: 14304 - DNA, 20 bp, Artificial Sequence
  Chr13_4 Forward Primer
ctcacagattgttgctggga

SEQ ID NO: 14305 - DNA, 20 bp, Artificial Sequence
  Chr13_4 Forward Primer
ctccttataagccccttgcc

SEQ ID NO: 14306 - DNA, 20 bp, Artificial Sequence
  Chr13_4 Forward Primer
acctcaggtcctttttggct

SEQ ID NO: 14307 - DNA, 20 bp, Artificial Sequence
  Chr13_4 Forward Primer
cccatccacctctatccaga

SEQ ID NO: 14308 - DNA, 20 bp, Artificial Sequence
  Chr13_4 Forward Primer
ttccctctgtcctcatcctg

SEQ ID NO: 14309 - DNA, 20 bp, Artificial Sequence
  Chr13_4 Forward Primer
gatactggccagattcgtcc

SEQ ID NO: 14310 - DNA, 23 bp, Artificial Sequence
  Chr13_4 Forward Primer
ttttgctcaatgtagcttgatgt

SEQ ID NO: 14311 - DNA, 20 bp, Artificial Sequence
  Chr13_4 Forward Primer
gacattcctctctctccccc

SEQ ID NO: 14312 - DNA, 20 bp, Artificial Sequence
  Chr13_4 Forward Primer
gccaggccaaaagacataaa

SEQ ID NO: 14313 - DNA, 20 bp, Artificial Sequence
  Chr13_4 Forward Primer
agggtcctggattactgcct

SEQ ID NO: 14314 - DNA, 20 bp, Artificial Sequence
  Chr13_4 Forward Primer
catcctgtgaacattgggaa

SEQ ID NO: 14315 - DNA, 20 bp, Artificial Sequence
  Chr13_4 Forward Primer
tcttggaagtgattgacccc

SEQ ID NO: 14316 - DNA, 23 bp, Artificial Sequence
  Chr13_4 Forward Primer
agtttatttaactgcccccaaga

SEQ ID NO: 14317 - DNA, 20 bp, Artificial Sequence
  Chr13_4 Forward Primer
gcactattctaggcatgggc

SEQ ID NO: 14318 - DNA, 20 bp, Artificial Sequence
  Chr13_4 Forward Primer
cagaggcaacatctgagcaa

SEQ ID NO: 14319 - DNA, 20 bp, Artificial Sequence
  Chr13_4 Forward Primer
ccactgcagagttttgagca

SEQ ID NO: 14320 - DNA, 20 bp, Artificial Sequence
  Chr13_4 Forward Primer
ttaagagtgcatgtgcccag

SEQ ID NO: 14321 - DNA, 20 bp, Artificial Sequence
  Chr13_4 Reverse Primer
cattggatctgcacaggaaa

SEQ ID NO: 14322 - DNA, 22 bp, Artificial Sequence
  Chr13_4 Reverse Primer
ctgggaaagtgacatctaccaa

SEQ ID NO: 14323 - DNA, 23 bp, Artificial Sequence
  Chr13_4 Reverse Primer
attccagacttatgggtgaacct

SEQ ID NO: 14324 - DNA, 21 bp, Artificial Sequence
  Chr13_4 Reverse Primer
gcagtgaatggtaatggcttt

SEQ ID NO: 14325 - DNA, 21 bp, Artificial Sequence
  Chr13_4 Reverse Primer
gctccatagggaactcacaga

SEQ ID NO: 14326 - DNA, 23 bp, Artificial Sequence
  Chr13_4 Reverse Primer
tccacctagtccagtacttttcc

SEQ ID NO: 14327 - DNA, 20 bp, Artificial Sequence
  Chr13_4 Reverse Primer
acagattgtggaatcctgcc

SEQ ID NO: 14328 - DNA, 20 bp, Artificial Sequence
  Chr13_4 Reverse Primer
cagaatcagacaagggtggg

SEQ ID NO: 14329 - DNA, 20 bp, Artificial Sequence
  Chr13_4 Reverse Primer
acaaaggtctgcatgggact

SEQ ID NO: 14330 - DNA, 20 bp, Artificial Sequence
  Chr13_4 Reverse Primer
tccgttgtccacccttaatc

SEQ ID NO: 14331 - DNA, 20 bp, Artificial Sequence
  Chr13_4 Reverse Primer
atatcgccctccccagtaac

SEQ ID NO: 14332 - DNA, 20 bp, Artificial Sequence
  Chr13_4 Reverse Primer
ccactcccatcccatattgt

SEQ ID NO: 14333 - DNA, 20 bp, Artificial Sequence
  Chr13_4 Reverse Primer
ggttgaagcagagaactggg

SEQ ID NO: 14334 - DNA, 20 bp, Artificial Sequence
  Chr13_4 Reverse Primer
gttccctctttgggaccttg

SEQ ID NO: 14335 - DNA, 21 bp, Artificial Sequence
  Chr13_4 Reverse Primer
agacagctggtcaggatttca

SEQ ID NO: 14336 - DNA, 21 bp, Artificial Sequence
  Chr13_4 Reverse Primer
aaaagcttggtatggtggtca

SEQ ID NO: 14337 - DNA, 22 bp, Artificial Sequence
  Chr13_4 Reverse Primer
aaattaaaggcacaggagacca

SEQ ID NO: 14338 - DNA, 20 bp, Artificial Sequence
  Chr13_4 Reverse Primer
agcatgctgctttttcccta

SEQ ID NO: 14339 - DNA, 20 bp, Artificial Sequence
  Chr13_4 Reverse Primer
taagggctgcaacagaacag

SEQ ID NO: 14340 - DNA, 20 bp, Artificial Sequence
  Chr13_4 Reverse Primer
tgggctgaaaggctttagaa

SEQ ID NO: 14341 - DNA, 23 bp, Artificial Sequence
  Chr13_4 Reverse Primer
tgagtgaatacagaaggaaagca

SEQ ID NO: 14342 - DNA, 24 bp, Artificial Sequence
  Chr13_4 Reverse Primer
aagtaccaccatttatcaagcaaa

SEQ ID NO: 14343 - DNA, 21 bp, Artificial Sequence
  Chr13_4 Reverse Primer
tggtgctaaaagaggcaaaga

SEQ ID NO: 14344 - DNA, 20 bp, Artificial Sequence
  Chr13_4 Reverse Primer
tgcttagaggtgtgctggtg

SEQ ID NO: 14345 - DNA, 20 bp, Artificial Sequence
  Chr13_4 Reverse Primer
atggaagccatggaagacac

SEQ ID NO: 14346 - DNA, 20 bp, Artificial Sequence
  Chr13_4 Reverse Primer
agctcagaggaccttagccc

SEQ ID NO: 14347 - DNA, 21 bp, Artificial Sequence
  Chr13_4 Reverse Primer
cctatatgcttcctcccttgg

SEQ ID NO: 14348 - DNA, 20 bp, Artificial Sequence
  Chr13_4 Reverse Primer
ctcccccaacgaacactaaa

SEQ ID NO: 14349 - DNA, 20 bp, Artificial Sequence
  Chr13_4 Reverse Primer
tcacactgcaaccaaactcc

SEQ ID NO: 14350 - DNA, 21 bp, Artificial Sequence
  Chr13_4 Reverse Primer
tgagcactggaaatctcaaca

SEQ ID NO: 14351 - DNA, 20 bp, Artificial Sequence
  Chr13_4 Reverse Primer
tgccattttgatcccattct

SEQ ID NO: 14352 - DNA, 21 bp, Artificial Sequence
  Chr13_4 Reverse Primer
ccatcaactaaaaaccaccaa

SEQ ID NO: 14353 - DNA, 20 bp, Artificial Sequence
  Chr13_4 Reverse Primer
atgccagagctggtttctgt

SEQ ID NO: 14354 - DNA, 20 bp, Artificial Sequence
  Chr13_4 Reverse Primer
gtaaaattcaggagcagccg

SEQ ID NO: 14355 - DNA, 20 bp, Artificial Sequence
  Chr13_4 Reverse Primer
agcaatgaccaacgaaaagg

SEQ ID NO: 14356 - DNA, 20 bp, Artificial Sequence
  Chr13_4 Reverse Primer
cccataacaatggcttttgc

SEQ ID NO: 14357 - DNA, 20 bp, Artificial Sequence
  Chr13_4 Reverse Primer
tttccacttcctccctgaga

SEQ ID NO: 14358 - DNA, 20 bp, Artificial Sequence
  Chr13_4 Reverse Primer
agaagggagttgcaagggtt

SEQ ID NO: 14359 - DNA, 20 bp, Artificial Sequence
  Chr13_4 Reverse Primer
tggaacccatttggagaaaa

SEQ ID NO: 14360 - DNA, 20 bp, Artificial Sequence
  Chr13_4 Reverse Primer
gcatttccatttgccgtatt

SEQ ID NO: 14361 - DNA, 20 bp, Artificial Sequence
  Chr13_4 Reverse Primer
tttacagcaccccaaggaac

SEQ ID NO: 14362 - DNA, 20 bp, Artificial Sequence
  Chr13_4 Reverse Primer
ccatatgagtcagcaacccc

SEQ ID NO: 14363 - DNA, 20 bp, Artificial Sequence
  Chr13_4 Reverse Primer
cagcacaaaagactggctcc

SEQ ID NO: 14364 - DNA, 20 bp, Artificial Sequence
  Chr13_4 Reverse Primer
acgggacagcattgtcctac

SEQ ID NO: 14365 - DNA, 20 bp, Artificial Sequence
  Chr13_4 Reverse Primer
caaggcttcaataatcccca

SEQ ID NO: 14366 - DNA, 20 bp, Artificial Sequence
  Chr13_4 Reverse Primer
ctgaacccaggtctgactcc

SEQ ID NO: 14367 - DNA, 22 bp, Artificial Sequence
  Chr13_4 Reverse Primer
tttcacctttcaaggatggatt

SEQ ID NO: 14368 - DNA, 20 bp, Artificial Sequence
  Chr13_4 Reverse Primer
atgctctctcagatgcacca

SEQ ID NO: 14369 - DNA, 20 bp, Artificial Sequence
  Chr13_4 Reverse Primer
aacactgccttttgccatct

SEQ ID NO: 14370 - DNA, 22 bp, Artificial Sequence
  Chr13_4 Reverse Primer
cctcaacaaaaatcaaatcgaa

SEQ ID NO: 14371 - DNA, 22 bp, Artificial Sequence
  Chr13_4 Reverse Primer
gcttttaaaatccaagttctgg

SEQ ID NO: 14372 - DNA, 20 bp, Artificial Sequence
  Chr13_4 Reverse Primer
cactgaacaagtgacggctg

SEQ ID NO: 14373 - DNA, 21 bp, Artificial Sequence
  Chr13_4 Reverse Primer
tcccctagacaactcactgga

SEQ ID NO: 14374 - DNA, 20 bp, Artificial Sequence
  Chr13_4 Reverse Primer
cagaaatctctcccatccca

SEQ ID NO: 14375 - DNA, 20 bp, Artificial Sequence
  Chr13_4 Reverse Primer
ggagcaggggagtactttca

SEQ ID NO: 14376 - DNA, 20 bp, Artificial Sequence
  Chr13_4 Reverse Primer
ctcacttcagcacatgcaca

SEQ ID NO: 14377 - DNA, 20 bp, Artificial Sequence
  Chr13_4 Reverse Primer
cattcttgcctttttcagcg

SEQ ID NO: 14378 - DNA, 20 bp, Artificial Sequence
  Chr13_4 Reverse Primer
gggatagatggtgggctttt

SEQ ID NO: 14379 - DNA, 21 bp, Artificial Sequence
  Chr13_4 Reverse Primer
tgggaatgaaatttatgtgct

SEQ ID NO: 14380 - DNA, 25 bp, Artificial Sequence
  Chr13_4 Reverse Primer
ccaaatacacacaaaatacagacaa

SEQ ID NO: 14381 - DNA, 20 bp, Artificial Sequence
  Chr13_4 Reverse Primer
tacttccccataccacccaa

SEQ ID NO: 14382 - DNA, 20 bp, Artificial Sequence
  Chr13_4 Reverse Primer
aaaattgaggttcgaccagc

SEQ ID NO: 14383 - DNA, 20 bp, Artificial Sequence
  Chr13_4 Reverse Primer
ctgccatattcagccagtca

SEQ ID NO: 14384 - DNA, 21 bp, Artificial Sequence
  Chr13_4 Reverse Primer
tggagcaggccatagactaga

SEQ ID NO: 14385 - DNA, 26 bp, Artificial Sequence
  Chr13_4 Reverse Primer
tgttaatttgaaacacaatttgaaag

SEQ ID NO: 14386 - DNA, 21 bp, Artificial Sequence
  Chr13_4 Reverse Primer
caaagaaggacaatgcacaga

SEQ ID NO: 14387 - DNA, 20 bp, Artificial Sequence
  Chr13_4 Reverse Primer
aaaaacacctaaccctcccc

SEQ ID NO: 14388 - DNA, 20 bp, Artificial Sequence
  Chr13_4 Reverse Primer
aaggaaggaaatgcacaagc

SEQ ID NO: 14389 - DNA, 20 bp, Artificial Sequence
  Chr13_4 Reverse Primer
tatcagcacaccacatggct

SEQ ID NO: 14390 - DNA, 20 bp, Artificial Sequence
  Chr13_4 Reverse Primer
ggccaaaactacatttccca

SEQ ID NO: 14391 - DNA, 21 bp, Artificial Sequence
  Chr13_4 Reverse Primer
tcaattgagagaacacaccca

SEQ ID NO: 14392 - DNA, 21 bp, Artificial Sequence
  Chr13_4 Reverse Primer
taccaatctgggaatcaaaaa

SEQ ID NO: 14393 - DNA, 20 bp, Artificial Sequence
  Chr13_4 Reverse Primer
ttaaaagccagtgcaggacc

SEQ ID NO: 14394 - DNA, 22 bp, Artificial Sequence
  Chr13_4 Reverse Primer
cagctttgtcacaatgacatga

SEQ ID NO: 14395 - DNA, 20 bp, Artificial Sequence
  Chr13_4 Reverse Primer
gaaacttcccactcagccaa

SEQ ID NO: 14396 - DNA, 20 bp, Artificial Sequence
  Chr13_4 Reverse Primer
agctttttgcagtcaatggc

SEQ ID NO: 14397 - DNA, 20 bp, Artificial Sequence
  Chr13_4 Reverse Primer
ggggcctgaagataatgaca

SEQ ID NO: 14398 - DNA, 21 bp, Artificial Sequence
  Chr13_4 Reverse Primer
gcaccaaactgtcaattctcc

SEQ ID NO: 14399 - DNA, 20 bp, Artificial Sequence
  Chr13_4 Reverse Primer
caaggtaggcaagctgcatt

SEQ ID NO: 14400 - DNA, 20 bp, Artificial Sequence
  Chr13_4 Reverse Primer
tgagctccagcagtcttgtg

SEQ ID NO: 14401 - DNA, 20 bp, Artificial Sequence
  Chr13_4 Reverse Primer
attccatccacccacacagt

SEQ ID NO: 14402 - DNA, 20 bp, Artificial Sequence
  Chr13_4 Reverse Primer
acagagacccagaggggaat

SEQ ID NO: 14403 - DNA, 20 bp, Artificial Sequence
  Chr13_4 Reverse Primer
gttctgccacacttcccatt

SEQ ID NO: 14404 - DNA, 20 bp, Artificial Sequence
  Chr13_4 Reverse Primer
gcgtttgtgtaggaaaggct

SEQ ID NO: 14405 - DNA, 20 bp, Artificial Sequence
  Chr13_4 Reverse Primer
agtcccactgcaataatggg

SEQ ID NO: 14406 - DNA, 20 bp, Artificial Sequence
  Chr13_4 Reverse Primer
gcagcaatcacagcacaaat

SEQ ID NO: 14407 - DNA, 20 bp, Artificial Sequence
  Chr13_4 Reverse Primer
gtgtgttgctgcccaagtaa

SEQ ID NO: 14408 - DNA, 23 bp, Artificial Sequence
  Chr13_4 Reverse Primer
tgaatcctcacaactgctatgaa

SEQ ID NO: 14409 - DNA, 20 bp, Artificial Sequence
  Chr13_4 Reverse Primer
cgtggtgcactggagagata

SEQ ID NO: 14410 - DNA, 20 bp, Artificial Sequence
  Chr13_4 Reverse Primer
ggatggtgtggagacacaga

SEQ ID NO: 14411 - DNA, 20 bp, Artificial Sequence
  Chr13_4 Reverse Primer
tcaaatctgaactcccgctt

SEQ ID NO: 14412 - DNA, 23 bp, Artificial Sequence
  Chr13_4 Reverse Primer
aacagttgttgaacacatggtga

SEQ ID NO: 14413 - DNA, 20 bp, Artificial Sequence
  Chr13_4 Reverse Primer
acttcacctcctccccaact

SEQ ID NO: 14414 - DNA, 20 bp, Artificial Sequence
  Chr13_4 Reverse Primer
ccgtggcctacaacactttt

SEQ ID NO: 14415 - DNA, 20 bp, Artificial Sequence
  Chr13_4 Reverse Primer
accacctcttaccaccctgg

SEQ ID NO: 14416 - DNA, 20 bp, Artificial Sequence
  Chr13_4 Reverse Primer
gatgggaggaaacaaagcaa

SEQ ID NO: 14417 - DNA, 26 bp, Artificial Sequence
  Chr13_5 Forward Primer
gcttaaagttattaacaacatgcaca

SEQ ID NO: 14418 - DNA, 21 bp, Artificial Sequence
  Chr13_5 Forward Primer
ctcagagttcacatgaagcca

SEQ ID NO: 14419 - DNA, 20 bp, Artificial Sequence
  Chr13_5 Forward Primer
actgcaaaactgccattgct

SEQ ID NO: 14420 - DNA, 20 bp, Artificial Sequence
  Chr13_5 Forward Primer
gctcagattaggcaaggctc

SEQ ID NO: 14421 - DNA, 25 bp, Artificial Sequence
  Chr13_5 Forward Primer
tgcatatattcccagtttagatgaa

SEQ ID NO: 14422 - DNA, 20 bp, Artificial Sequence
  Chr13_5 Forward Primer
tttgctgatttggggaaaac

SEQ ID NO: 14423 - DNA, 24 bp, Artificial Sequence
  Chr13_5 Forward Primer
tctgatgatacacttgtcccattt

SEQ ID NO: 14424 - DNA, 20 bp, Artificial Sequence
  Chr13_5 Forward Primer
ctttcaaggcccagaacaaa

SEQ ID NO: 14425 - DNA, 24 bp, Artificial Sequence
  Chr13_5 Forward Primer
tgcttaaatttttatgaccagaca

SEQ ID NO: 14426 - DNA, 25 bp, Artificial Sequence
  Chr13_5 Forward Primer
gcttcaatacatttatttgcttcaa

SEQ ID NO: 14427 - DNA, 20 bp, Artificial Sequence
  Chr13_5 Forward Primer
tggcaatgcctatgtgtcat

SEQ ID NO: 14428 - DNA, 20 bp, Artificial Sequence
  Chr13_5 Forward Primer
caaatcaaaccacgtcaccc

SEQ ID NO: 14429 - DNA, 20 bp, Artificial Sequence
  Chr13_5 Forward Primer
ctttgcaactcctgctcctt

SEQ ID NO: 14430 - DNA, 20 bp, Artificial Sequence
  Chr13_5 Forward Primer
ccataatggaggcagtgtca

SEQ ID NO: 14431 - DNA, 20 bp, Artificial Sequence
  Chr13_5 Forward Primer
ccaaattcccatgtgaccat

SEQ ID NO: 14432 - DNA, 20 bp, Artificial Sequence
  Chr13_5 Forward Primer
ccatagaggacccagagcct

SEQ ID NO: 14433 - DNA, 20 bp, Artificial Sequence
  Chr13_5 Forward Primer
tgcaaagtaagccaggatgg

SEQ ID NO: 14434 - DNA, 22 bp, Artificial Sequence
  Chr13_5 Forward Primer
ggagattgttgtctttcagtgg

SEQ ID NO: 14435 - DNA, 20 bp, Artificial Sequence
  Chr13_5 Forward Primer
attggcctctgcatgatctc

SEQ ID NO: 14436 - DNA, 20 bp, Artificial Sequence
  Chr13_5 Forward Primer
cggaaactggagattgaagc

SEQ ID NO: 14437 - DNA, 20 bp, Artificial Sequence
  Chr13_5 Forward Primer
acatacttcccatgtccccc

SEQ ID NO: 14438 - DNA, 20 bp, Artificial Sequence
  Chr13_5 Forward Primer
tgatggaatctggctcttga

SEQ ID NO: 14439 - DNA, 20 bp, Artificial Sequence
  Chr13_5 Forward Primer
ctccaagttcctgactccca

SEQ ID NO: 14440 - DNA, 20 bp, Artificial Sequence
  Chr13_5 Forward Primer
gcaatgctaccccaattctc

SEQ ID NO: 14441 - DNA, 20 bp, Artificial Sequence
  Chr13_5 Forward Primer
tttatcatctgcctccctca

SEQ ID NO: 14442 - DNA, 21 bp, Artificial Sequence
  Chr13_5 Forward Primer
tctcacatttgcctgtgaaaa

SEQ ID NO: 14443 - DNA, 20 bp, Artificial Sequence
  Chr13_5 Forward Primer
gcatttgctttcttggcttc

SEQ ID NO: 14444 - DNA, 20 bp, Artificial Sequence
  Chr13_5 Forward Primer
atttcccttacggagttgcc

SEQ ID NO: 14445 - DNA, 21 bp, Artificial Sequence
  Chr13_5 Forward Primer
caccctggcacttgaaaatta

SEQ ID NO: 14446 - DNA, 26 bp, Artificial Sequence
  Chr13_5 Forward Primer
tgcgattacctgattatttcttaatg

SEQ ID NO: 14447 - DNA, 20 bp, Artificial Sequence
  Chr13_5 Forward Primer
cacatgccacaattaccaca

SEQ ID NO: 14448 - DNA, 21 bp, Artificial Sequence
  Chr13_5 Forward Primer
ttggccatttctactgctctc

SEQ ID NO: 14449 - DNA, 24 bp, Artificial Sequence
  Chr13_5 Forward Primer
ttccattgttaagagctttttcct

SEQ ID NO: 14450 - DNA, 20 bp, Artificial Sequence
  Chr13_5 Forward Primer
aaaaatggcgtatgtggtcc

SEQ ID NO: 14451 - DNA, 20 bp, Artificial Sequence
  Chr13_5 Forward Primer
tgcaaagaccatgtagccag

SEQ ID NO: 14452 - DNA, 20 bp, Artificial Sequence
  Chr13_5 Forward Primer
cctttcgcccagagagtaaa

SEQ ID NO: 14453 - DNA, 20 bp, Artificial Sequence
  Chr13_5 Forward Primer
acctggaagatgacagtgcc

SEQ ID NO: 14454 - DNA, 20 bp, Artificial Sequence
  Chr13_5 Forward Primer
tgaaatagagcccatctggc

SEQ ID NO: 14455 - DNA, 20 bp, Artificial Sequence
  Chr13_5 Forward Primer
ggccactgatgctttgaaac

SEQ ID NO: 14456 - DNA, 26 bp, Artificial Sequence
  Chr13_5 Forward Primer
aagtttatgattgagtgctatggaaa

SEQ ID NO: 14457 - DNA, 27 bp, Artificial Sequence
  Chr13_5 Forward Primer
aaaaattcagttactcctgtattggaa

SEQ ID NO: 14458 - DNA, 20 bp, Artificial Sequence
  Chr13_5 Forward Primer
atggaaagggaatctgtggg

SEQ ID NO: 14459 - DNA, 20 bp, Artificial Sequence
  Chr13_5 Forward Primer
aaactttggacctcgatccc

SEQ ID NO: 14460 - DNA, 27 bp, Artificial Sequence
  Chr13_5 Forward Primer
tgctgtatgagaagaaacaagtattca

SEQ ID NO: 14461 - DNA, 24 bp, Artificial Sequence
  Chr13_5 Forward Primer
tcaagagagaaacacaacaaacaa

SEQ ID NO: 14462 - DNA, 21 bp, Artificial Sequence
  Chr13_5 Forward Primer
gcagtctgggagttagggttc

SEQ ID NO: 14463 - DNA, 24 bp, Artificial Sequence
  Chr13_5 Forward Primer
actagatgaaaccagagaagttcc

SEQ ID NO: 14464 - DNA, 20 bp, Artificial Sequence
  Chr13_5 Forward Primer
ttgcccaactgtctattgga

SEQ ID NO: 14465 - DNA, 21 bp, Artificial Sequence
  Chr13_5 Forward Primer
cagttgacctatgttgggcat

SEQ ID NO: 14466 - DNA, 22 bp, Artificial Sequence
  Chr13_5 Forward Primer
ggaccctgaaaacagttacagc

SEQ ID NO: 14467 - DNA, 20 bp, Artificial Sequence
  Chr13_5 Forward Primer
tttgcaagtgaaaaatgcca

SEQ ID NO: 14468 - DNA, 23 bp, Artificial Sequence
  Chr13_5 Forward Primer
ttgagcctacaggataaacttca

SEQ ID NO: 14469 - DNA, 21 bp, Artificial Sequence
  Chr13_5 Forward Primer
cccaacctctttgatttgaca

SEQ ID NO: 14470 - DNA, 23 bp, Artificial Sequence
  Chr13_5 Forward Primer
ttctgtgtgaattctcatcaacc

SEQ ID NO: 14471 - DNA, 20 bp, Artificial Sequence
  Chr13_5 Forward Primer
actgcactggcatttgtttg

SEQ ID NO: 14472 - DNA, 20 bp, Artificial Sequence
  Chr13_5 Forward Primer
ccgaattaccatgaagccat

SEQ ID NO: 14473 - DNA, 22 bp, Artificial Sequence
  Chr13_5 Forward Primer
tgtttcttctttccctctcaca

SEQ ID NO: 14474 - DNA, 20 bp, Artificial Sequence
  Chr13_5 Forward Primer
gccgagaaatactgggagaa

SEQ ID NO: 14475 - DNA, 20 bp, Artificial Sequence
  Chr13_5 Forward Primer
tggaaacagcagaaggatca

SEQ ID NO: 14476 - DNA, 20 bp, Artificial Sequence
  Chr13_5 Forward Primer
tcgagaggaggataagccaa

SEQ ID NO: 14477 - DNA, 20 bp, Artificial Sequence
  Chr13_5 Forward Primer
gaggggaaagaggcatttgt

SEQ ID NO: 14478 - DNA, 21 bp, Artificial Sequence
  Chr13_5 Forward Primer
tgctagtccatcaccagacag

SEQ ID NO: 14479 - DNA, 20 bp, Artificial Sequence
  Chr13_5 Forward Primer
ttgcgatgacatggtttgat

SEQ ID NO: 14480 - DNA, 20 bp, Artificial Sequence
  Chr13_5 Forward Primer
ggcaatttgaatttttccca

SEQ ID NO: 14481 - DNA, 21 bp, Artificial Sequence
  Chr13_5 Forward Primer
aaaggctttaaatgtgggaga

SEQ ID NO: 14482 - DNA, 26 bp, Artificial Sequence
  Chr13_5 Forward Primer
tttctgtagtgtcttgattttcctaa

SEQ ID NO: 14483 - DNA, 20 bp, Artificial Sequence
  Chr13_5 Forward Primer
gcatatcatctgggctttgg

SEQ ID NO: 14484 - DNA, 20 bp, Artificial Sequence
  Chr13_5 Forward Primer
catgccaagcatgttgactc

SEQ ID NO: 14485 - DNA, 21 bp, Artificial Sequence
  Chr13_5 Forward Primer
aacatgataatccccttccac

SEQ ID NO: 14486 - DNA, 26 bp, Artificial Sequence
  Chr13_5 Forward Primer
tcacaaagcattttatcttctgtttt

SEQ ID NO: 14487 - DNA, 20 bp, Artificial Sequence
  Chr13_5 Forward Primer
gctccttttgagaggcaggt

SEQ ID NO: 14488 - DNA, 27 bp, Artificial Sequence
  Chr13_5 Forward Primer
ttctagtttctttcctaagattttctg

SEQ ID NO: 14489 - DNA, 22 bp, Artificial Sequence
  Chr13_5 Forward Primer
tggaatgcacttagaagcaaaa

SEQ ID NO: 14490 - DNA, 21 bp, Artificial Sequence
  Chr13_5 Forward Primer
tttaccaagcacacctaaccg

SEQ ID NO: 14491 - DNA, 27 bp, Artificial Sequence
  Chr13_5 Forward Primer
gaaaacgagagaaagaagagataatga

SEQ ID NO: 14492 - DNA, 20 bp, Artificial Sequence
  Chr13_5 Forward Primer
attaacggttgtggtgtgcc

SEQ ID NO: 14493 - DNA, 20 bp, Artificial Sequence
  Chr13_5 Forward Primer
tgcctggaggagtgctaact

SEQ ID NO: 14494 - DNA, 20 bp, Artificial Sequence
  Chr13_5 Forward Primer
agtgccactgggcagataag

SEQ ID NO: 14495 - DNA, 20 bp, Artificial Sequence
  Chr13_5 Forward Primer
gtgtgttcctccatccatga

SEQ ID NO: 14496 - DNA, 20 bp, Artificial Sequence
  Chr13_5 Forward Primer
tgttgcaaaagcaacaaatg

SEQ ID NO: 14497 - DNA, 20 bp, Artificial Sequence
  Chr13_5 Forward Primer
caaacacgcgtgaagaatgt

SEQ ID NO: 14498 - DNA, 26 bp, Artificial Sequence
  Chr13_5 Forward Primer
ccataatatttcttggaaaatggttt

SEQ ID NO: 14499 - DNA, 25 bp, Artificial Sequence
  Chr13_5 Forward Primer
tgtcaagaagaaataacgtctcctc

SEQ ID NO: 14500 - DNA, 20 bp, Artificial Sequence
  Chr13_5 Forward Primer
tcacttcaacagggagcaaa

SEQ ID NO: 14501 - DNA, 23 bp, Artificial Sequence
  Chr13_5 Forward Primer
ccaaaatgtcctgaattatgcaa

SEQ ID NO: 14502 - DNA, 20 bp, Artificial Sequence
  Chr13_5 Forward Primer
agcctgggatgaggtcagta

SEQ ID NO: 14503 - DNA, 25 bp, Artificial Sequence
  Chr13_5 Forward Primer
aaaacttactatgcaggtacccaga

SEQ ID NO: 14504 - DNA, 22 bp, Artificial Sequence
  Chr13_5 Forward Primer
ccatttactcttctacaggccc

SEQ ID NO: 14505 - DNA, 24 bp, Artificial Sequence
  Chr13_5 Forward Primer
tttcatcaaatatgaaaattctgc

SEQ ID NO: 14506 - DNA, 20 bp, Artificial Sequence
  Chr13_5 Forward Primer
ccatttgatccaaaagcaca

SEQ ID NO: 14507 - DNA, 21 bp, Artificial Sequence
  Chr13_5 Forward Primer
cccaaccatataagcactgga

SEQ ID NO: 14508 - DNA, 20 bp, Artificial Sequence
  Chr13_5 Forward Primer
cagatgccatcatctctcca

SEQ ID NO: 14509 - DNA, 20 bp, Artificial Sequence
  Chr13_5 Forward Primer
cccaccatcctcctacctct

SEQ ID NO: 14510 - DNA, 20 bp, Artificial Sequence
  Chr13_5 Forward Primer
tcctttatcatttcctggcg

SEQ ID NO: 14511 - DNA, 24 bp, Artificial Sequence
  Chr13_5 Forward Primer
ttgtacatgtaatggctttggaat

SEQ ID NO: 14512 - DNA, 20 bp, Artificial Sequence
  Chr13_5 Forward Primer
ttcaagacatggggtaagcc

SEQ ID NO: 14513 - DNA, 23 bp, Artificial Sequence
  Chr13_5 Reverse Primer
aaaacctttgctagaatgcttca

SEQ ID NO: 14514 - DNA, 20 bp, Artificial Sequence
  Chr13_5 Reverse Primer
aaaatcatgggtgtgaaggc

SEQ ID NO: 14515 - DNA, 20 bp, Artificial Sequence
  Chr13_5 Reverse Primer
ccatgctaagcaccatcaga

SEQ ID NO: 14516 - DNA, 20 bp, Artificial Sequence
  Chr13_5 Reverse Primer
gctgttcgcatttgttctca

SEQ ID NO: 14517 - DNA, 20 bp, Artificial Sequence
  Chr13_5 Reverse Primer
agttccgtttttacggggag

SEQ ID NO: 14518 - DNA, 20 bp, Artificial Sequence
  Chr13_5 Reverse Primer
ctctgacaaaagatgccggt

SEQ ID NO: 14519 - DNA, 21 bp, Artificial Sequence
  Chr13_5 Reverse Primer
aatgctgcttagtcaggcaaa

SEQ ID NO: 14520 - DNA, 20 bp, Artificial Sequence
  Chr13_5 Reverse Primer
tctactgtgcccgagaaaca

SEQ ID NO: 14521 - DNA, 26 bp, Artificial Sequence
  Chr13_5 Reverse Primer
ttgaaacaaaagacaaaagaaaaatg

SEQ ID NO: 14522 - DNA, 24 bp, Artificial Sequence
  Chr13_5 Reverse Primer
aaagaatgaactctcttgcatttc

SEQ ID NO: 14523 - DNA, 20 bp, Artificial Sequence
  Chr13_5 Reverse Primer
tggtagggactcccaaagaa

SEQ ID NO: 14524 - DNA, 20 bp, Artificial Sequence
  Chr13_5 Reverse Primer
ggcttaatggagacccacaa

SEQ ID NO: 14525 - DNA, 20 bp, Artificial Sequence
  Chr13_5 Reverse Primer
gcaaagctctagggccagta

SEQ ID NO: 14526 - DNA, 24 bp, Artificial Sequence
  Chr13_5 Reverse Primer
ttcaaaacatgaatcgaagagaaa

SEQ ID NO: 14527 - DNA, 20 bp, Artificial Sequence
  Chr13_5 Reverse Primer
tccccatgaaagggcttaat

SEQ ID NO: 14528 - DNA, 20 bp, Artificial Sequence
  Chr13_5 Reverse Primer
tggatgctgaagaaggttga

SEQ ID NO: 14529 - DNA, 25 bp, Artificial Sequence
  Chr13_5 Reverse Primer
tgtactgagagtgagacacaaaaga

SEQ ID NO: 14530 - DNA, 20 bp, Artificial Sequence
  Chr13_5 Reverse Primer
gatgtctgctttgaaaccca

SEQ ID NO: 14531 - DNA, 20 bp, Artificial Sequence
  Chr13_5 Reverse Primer
catcccattttgtctccctg

SEQ ID NO: 14532 - DNA, 20 bp, Artificial Sequence
  Chr13_5 Reverse Primer
gccacatcaaatgtcacctg

SEQ ID NO: 14533 - DNA, 20 bp, Artificial Sequence
  Chr13_5 Reverse Primer
aacaggagccaaaagcagaa

SEQ ID NO: 14534 - DNA, 20 bp, Artificial Sequence
  Chr13_5 Reverse Primer
cccatgagatcgatgagagg

SEQ ID NO: 14535 - DNA, 20 bp, Artificial Sequence
  Chr13_5 Reverse Primer
gggctgagaggaaaagaggt

SEQ ID NO: 14536 - DNA, 20 bp, Artificial Sequence
  Chr13_5 Reverse Primer
tcatttgagcagaagcctga

SEQ ID NO: 14537 - DNA, 25 bp, Artificial Sequence
  Chr13_5 Reverse Primer
ttctcccaatagaatttacaggttt

SEQ ID NO: 14538 - DNA, 21 bp, Artificial Sequence
  Chr13_5 Reverse Primer
tggcatgcaaaatttagaaca

SEQ ID NO: 14539 - DNA, 20 bp, Artificial Sequence
  Chr13_5 Reverse Primer
ggtgtttagcgtgctgtgaa

SEQ ID NO: 14540 - DNA, 21 bp, Artificial Sequence
  Chr13_5 Reverse Primer
caaaccaaaaggaacgtgaga

SEQ ID NO: 14541 - DNA, 24 bp, Artificial Sequence
  Chr13_5 Reverse Primer
gacaatggttacttgtaaggctga

SEQ ID NO: 14542 - DNA, 22 bp, Artificial Sequence
  Chr13_5 Reverse Primer
tttcaatggctatgttttgctc

SEQ ID NO: 14543 - DNA, 22 bp, Artificial Sequence
  Chr13_5 Reverse Primer
aagcaaagaacatattttgcca

SEQ ID NO: 14544 - DNA, 26 bp, Artificial Sequence
  Chr13_5 Reverse Primer
aaaaatattaattaagccggttttca

SEQ ID NO: 14545 - DNA, 21 bp, Artificial Sequence
  Chr13_5 Reverse Primer
ttctggggatcagaaagacaa

SEQ ID NO: 14546 - DNA, 23 bp, Artificial Sequence
  Chr13_5 Reverse Primer
ccataaaggctttttattccaga

SEQ ID NO: 14547 - DNA, 20 bp, Artificial Sequence
  Chr13_5 Reverse Primer
cctgctgggaggatgaaata

SEQ ID NO: 14548 - DNA, 20 bp, Artificial Sequence
  Chr13_5 Reverse Primer
cagggaaggagaacaccaga

SEQ ID NO: 14549 - DNA, 20 bp, Artificial Sequence
  Chr13_5 Reverse Primer
cctctttccgttttccttga

SEQ ID NO: 14550 - DNA, 25 bp, Artificial Sequence
  Chr13_5 Reverse Primer
ggtctttctttttaaatattttgcc

SEQ ID NO: 14551 - DNA, 26 bp, Artificial Sequence
  Chr13_5 Reverse Primer
tgcatatgttgagatattcaggtttt

SEQ ID NO: 14552 - DNA, 22 bp, Artificial Sequence
  Chr13_5 Reverse Primer
ttgaagactttcattccttccc

SEQ ID NO: 14553 - DNA, 20 bp, Artificial Sequence
  Chr13_5 Reverse Primer
tggcaaaaacagatagccct

SEQ ID NO: 14554 - DNA, 22 bp, Artificial Sequence
  Chr13_5 Reverse Primer
aagtgcttcaacagaaactccc

SEQ ID NO: 14555 - DNA, 20 bp, Artificial Sequence
  Chr13_5 Reverse Primer
ccttctagcactcagcgtcc

SEQ ID NO: 14556 - DNA, 22 bp, Artificial Sequence
  Chr13_5 Reverse Primer
ggaaatggatagattgatggga

SEQ ID NO: 14557 - DNA, 20 bp, Artificial Sequence
  Chr13_5 Reverse Primer
cccagcctttcttttctcct

SEQ ID NO: 14558 - DNA, 20 bp, Artificial Sequence
  Chr13_5 Reverse Primer
ccgcaggtaggtacccaata

SEQ ID NO: 14559 - DNA, 20 bp, Artificial Sequence
  Chr13_5 Reverse Primer
cagaatcattggtcaccagg

SEQ ID NO: 14560 - DNA, 20 bp, Artificial Sequence
  Chr13_5 Reverse Primer
aagtcagctggctccatacc

SEQ ID NO: 14561 - DNA, 22 bp, Artificial Sequence
  Chr13_5 Reverse Primer
tgacagtttctatcacatggca

SEQ ID NO: 14562 - DNA, 20 bp, Artificial Sequence
  Chr13_5 Reverse Primer
ttatctgcttcctggttggc

SEQ ID NO: 14563 - DNA, 24 bp, Artificial Sequence
  Chr13_5 Reverse Primer
tcattcaagggtagtgatgaagaa

SEQ ID NO: 14564 - DNA, 21 bp, Artificial Sequence
  Chr13_5 Reverse Primer
ggataatatgtcccgatgggt

SEQ ID NO: 14565 - DNA, 20 bp, Artificial Sequence
  Chr13_5 Reverse Primer
tggaacaaaagggcaaaaag

SEQ ID NO: 14566 - DNA, 20 bp, Artificial Sequence
  Chr13_5 Reverse Primer
tcccaagcaaagaaagcaag

SEQ ID NO: 14567 - DNA, 20 bp, Artificial Sequence
  Chr13_5 Reverse Primer
cagggaagcaagaggagaga

SEQ ID NO: 14568 - DNA, 20 bp, Artificial Sequence
  Chr13_5 Reverse Primer
ccagaagctggaatgtgtga

SEQ ID NO: 14569 - DNA, 21 bp, Artificial Sequence
  Chr13_5 Reverse Primer
aggttatttggtggttgttgc

SEQ ID NO: 14570 - DNA, 23 bp, Artificial Sequence
  Chr13_5 Reverse Primer
tccaaaagactctgatgacaaga

SEQ ID NO: 14571 - DNA, 23 bp, Artificial Sequence
  Chr13_5 Reverse Primer
ccatcattattagaatctgggca

SEQ ID NO: 14572 - DNA, 20 bp, Artificial Sequence
  Chr13_5 Reverse Primer
gaaaggaggagtgggaaagg

SEQ ID NO: 14573 - DNA, 23 bp, Artificial Sequence
  Chr13_5 Reverse Primer
aattcctcatattcttctcagca

SEQ ID NO: 14574 - DNA, 20 bp, Artificial Sequence
  Chr13_5 Reverse Primer
tccattcagctgctctcaac

SEQ ID NO: 14575 - DNA, 20 bp, Artificial Sequence
  Chr13_5 Reverse Primer
gccggctatccaatttacaa

SEQ ID NO: 14576 - DNA, 21 bp, Artificial Sequence
  Chr13_5 Reverse Primer
tggtgatcaaccaaaaatcct

SEQ ID NO: 14577 - DNA, 21 bp, Artificial Sequence
  Chr13_5 Reverse Primer
gcttatggatgtcccagtgaa

SEQ ID NO: 14578 - DNA, 21 bp, Artificial Sequence
  Chr13_5 Reverse Primer
tgcggggctcaatataaataa

SEQ ID NO: 14579 - DNA, 20 bp, Artificial Sequence
  Chr13_5 Reverse Primer
agagctaaagggggagcaac

SEQ ID NO: 14580 - DNA, 20 bp, Artificial Sequence
  Chr13_5 Reverse Primer
ctgaggttcttgaaggcagg

SEQ ID NO: 14581 - DNA, 22 bp, Artificial Sequence
  Chr13_5 Reverse Primer
tcagcgaatgtttatggagttg

SEQ ID NO: 14582 - DNA, 21 bp, Artificial Sequence
  Chr13_5 Reverse Primer
tcaaaggggtacaggatgaga

SEQ ID NO: 14583 - DNA, 21 bp, Artificial Sequence
  Chr13_5 Reverse Primer
aggagtgttaggagtctgcca

SEQ ID NO: 14584 - DNA, 20 bp, Artificial Sequence
  Chr13_5 Reverse Primer
tgcatgtgcctcttgtatga

SEQ ID NO: 14585 - DNA, 23 bp, Artificial Sequence
  Chr13_5 Reverse Primer
tgaaaatgaagtactcactgcct

SEQ ID NO: 14586 - DNA, 21 bp, Artificial Sequence
  Chr13_5 Reverse Primer
tccattctggcttcagacatt

SEQ ID NO: 14587 - DNA, 20 bp, Artificial Sequence
  Chr13_5 Reverse Primer
aatgcggggtaacaaaatgt

SEQ ID NO: 14588 - DNA, 21 bp, Artificial Sequence
  Chr13_5 Reverse Primer
gggtttactagacacccatgc

SEQ ID NO: 14589 - DNA, 20 bp, Artificial Sequence
  Chr13_5 Reverse Primer
tgactccagttgccaatgtc

SEQ ID NO: 14590 - DNA, 20 bp, Artificial Sequence
  Chr13_5 Reverse Primer
cctggaaacttcacgttggt

SEQ ID NO: 14591 - DNA, 20 bp, Artificial Sequence
  Chr13_5 Reverse Primer
tgagctattcacccctctcc

SEQ ID NO: 14592 - DNA, 20 bp, Artificial Sequence
  Chr13_5 Reverse Primer
gaggggaaaggatggaagag

SEQ ID NO: 14593 - DNA, 23 bp, Artificial Sequence
  Chr13_5 Reverse Primer
ctttttgttgtaatttgagggaa

SEQ ID NO: 14594 - DNA, 20 bp, Artificial Sequence
  Chr13_5 Reverse Primer
gaatgcacgattgccctatt

SEQ ID NO: 14595 - DNA, 23 bp, Artificial Sequence
  Chr13_5 Reverse Primer
tgagagatgctgaaagagacaaa

SEQ ID NO: 14596 - DNA, 22 bp, Artificial Sequence
  Chr13_5 Reverse Primer
catgaattttctgatggaccac

SEQ ID NO: 14597 - DNA, 20 bp, Artificial Sequence
  Chr13_5 Reverse Primer
gatgaaaggagaatgccagc

SEQ ID NO: 14598 - DNA, 20 bp, Artificial Sequence
  Chr13_5 Reverse Primer
gttcggtgtcccaactgaag

SEQ ID NO: 14599 - DNA, 20 bp, Artificial Sequence
  Chr13_5 Reverse Primer
gcaaaagactggtaggctca

SEQ ID NO: 14600 - DNA, 22 bp, Artificial Sequence
  Chr13_5 Reverse Primer
tcacagaggtgagcttgtaacc

SEQ ID NO: 14601 - DNA, 22 bp, Artificial Sequence
  Chr13_5 Reverse Primer
cactcaaaagaatgaaaggtgc

SEQ ID NO: 14602 - DNA, 25 bp, Artificial Sequence
  Chr13_5 Reverse Primer
tttagaaatgtatttgcattccctt

SEQ ID NO: 14603 - DNA, 20 bp, Artificial Sequence
  Chr13_5 Reverse Primer
tactggagtttgggggaaca

SEQ ID NO: 14604 - DNA, 20 bp, Artificial Sequence
  Chr13_5 Reverse Primer
catcttcctcccactaccca

SEQ ID NO: 14605 - DNA, 25 bp, Artificial Sequence
  Chr13_5 Reverse Primer
gctttttacaactgtagaaccctaa

SEQ ID NO: 14606 - DNA, 20 bp, Artificial Sequence
  Chr13_5 Reverse Primer
tctgccttgtcatttgaggc

SEQ ID NO: 14607 - DNA, 21 bp, Artificial Sequence
  Chr13_5 Reverse Primer
gacctctacacagccatgctt

SEQ ID NO: 14608 - DNA, 20 bp, Artificial Sequence
  Chr13_5 Reverse Primer
aagcagcaggttttgcaatc

SEQ ID NO: 14609 - DNA, 23 bp, Artificial Sequence
  Chr13_6 Forward Primer
cattgagactctgggaatactgg

SEQ ID NO: 14610 - DNA, 20 bp, Artificial Sequence
  Chr13_6 Forward Primer
accacatggcaccagatttt

SEQ ID NO: 14611 - DNA, 22 bp, Artificial Sequence
  Chr13_6 Forward Primer
catttgcatgcagacctatttc

SEQ ID NO: 14612 - DNA, 20 bp, Artificial Sequence
  Chr13_6 Forward Primer
attgccctgaatcacacctg

SEQ ID NO: 14613 - DNA, 24 bp, Artificial Sequence
  Chr13_6 Forward Primer
ttctgcgttcaatgttacttgttt

SEQ ID NO: 14614 - DNA, 20 bp, Artificial Sequence
  Chr13_6 Forward Primer
ccctggttggaaaaagtgaa

SEQ ID NO: 14615 - DNA, 21 bp, Artificial Sequence
  Chr13_6 Forward Primer
gctcacttttccagggaactc

SEQ ID NO: 14616 - DNA, 20 bp, Artificial Sequence
  Chr13_6 Forward Primer
cataaaaactggggaaggca

SEQ ID NO: 14617 - DNA, 22 bp, Artificial Sequence
  Chr13_6 Forward Primer
tggtttgtcctttcaagttgtg

SEQ ID NO: 14618 - DNA, 26 bp, Artificial Sequence
  Chr13_6 Forward Primer
tcatgtcaagataacttaatcgtcaa

SEQ ID NO: 14619 - DNA, 21 bp, Artificial Sequence
  Chr13_6 Forward Primer
tgtggggtttgtgtatgagtg

SEQ ID NO: 14620 - DNA, 21 bp, Artificial Sequence
  Chr13_6 Forward Primer
aggaggctgagattcagattg

SEQ ID NO: 14621 - DNA, 24 bp, Artificial Sequence
  Chr13_6 Forward Primer
gactatttctcccaaaaacaaaca

SEQ ID NO: 14622 - DNA, 25 bp, Artificial Sequence
  Chr13_6 Forward Primer
tgttttatgaggatgatgatgtctt

SEQ ID NO: 14623 - DNA, 20 bp, Artificial Sequence
  Chr13_6 Forward Primer
ccaaaaagggaaaaagtccc

SEQ ID NO: 14624 - DNA, 23 bp, Artificial Sequence
  Chr13_6 Forward Primer
ccaagaaatcttttgtgcaacat

SEQ ID NO: 14625 - DNA, 19 bp, Artificial Sequence
  Chr13_6 Forward Primer
ggcataaagagcacgcaaa

SEQ ID NO: 14626 - DNA, 20 bp, Artificial Sequence
  Chr13_6 Forward Primer
gtctggtgacaggtgcattg

SEQ ID NO: 14627 - DNA, 20 bp, Artificial Sequence
  Chr13_6 Forward Primer
accatttccaggactttcca

SEQ ID NO: 14628 - DNA, 21 bp, Artificial Sequence
  Chr13_6 Forward Primer
ttctgccttctgcttatctgc

SEQ ID NO: 14629 - DNA, 24 bp, Artificial Sequence
  Chr13_6 Forward Primer
caaattatgagagaaaatgcagaa

SEQ ID NO: 14630 - DNA, 24 bp, Artificial Sequence
  Chr13_6 Forward Primer
tttgccctttatcttttattgagg

SEQ ID NO: 14631 - DNA, 20 bp, Artificial Sequence
  Chr13_6 Forward Primer
acaaaccatggtggttccta

SEQ ID NO: 14632 - DNA, 20 bp, Artificial Sequence
  Chr13_6 Forward Primer
tgccagcttaaccaaaaagg

SEQ ID NO: 14633 - DNA, 22 bp, Artificial Sequence
  Chr13_6 Forward Primer
cctgcccatcatttctctagtc

SEQ ID NO: 14634 - DNA, 20 bp, Artificial Sequence
  Chr13_6 Forward Primer
acattgccaaggcagagaat

SEQ ID NO: 14635 - DNA, 24 bp, Artificial Sequence
  Chr13_6 Forward Primer
tgttttgttttattggttgaggaa

SEQ ID NO: 14636 - DNA, 20 bp, Artificial Sequence
  Chr13_6 Forward Primer
tggcaaaggtccctcttaaa

SEQ ID NO: 14637 - DNA, 20 bp, Artificial Sequence
  Chr13_6 Forward Primer
cggttttaaattccgccttt

SEQ ID NO: 14638 - DNA, 20 bp, Artificial Sequence
  Chr13_6 Forward Primer
aaccccaaccagtgcatatc

SEQ ID NO: 14639 - DNA, 20 bp, Artificial Sequence
  Chr13_6 Forward Primer
tcaggtgctcacttcctcct

SEQ ID NO: 14640 - DNA, 20 bp, Artificial Sequence
  Chr13_6 Forward Primer
tctggggctttaaggattca

SEQ ID NO: 14641 - DNA, 20 bp, Artificial Sequence
  Chr13_6 Forward Primer
cttcagcaccgcttcctaac

SEQ ID NO: 14642 - DNA, 21 bp, Artificial Sequence
  Chr13_6 Forward Primer
agaaggtgatttccaggagga

SEQ ID NO: 14643 - DNA, 20 bp, Artificial Sequence
  Chr13_6 Forward Primer
acacttaccaagaggcaggc

SEQ ID NO: 14644 - DNA, 20 bp, Artificial Sequence
  Chr13_6 Forward Primer
gaggacagcagcatgtgaga

SEQ ID NO: 14645 - DNA, 21 bp, Artificial Sequence
  Chr13_6 Forward Primer
gcgataggctacgtaccaaaa

SEQ ID NO: 14646 - DNA, 20 bp, Artificial Sequence
  Chr13_6 Forward Primer
ccttcatgaacagcctcctt

SEQ ID NO: 14647 - DNA, 20 bp, Artificial Sequence
  Chr13_6 Forward Primer
aaccatgaccgaaacaatcc

SEQ ID NO: 14648 - DNA, 21 bp, Artificial Sequence
  Chr13_6 Forward Primer
tgcatttttcccctttttaca

SEQ ID NO: 14649 - DNA, 20 bp, Artificial Sequence
  Chr13_6 Forward Primer
tgaaaatgctgcatggaaaa

SEQ ID NO: 14650 - DNA, 20 bp, Artificial Sequence
  Chr13_6 Forward Primer
cccaaatggatagttggcac

SEQ ID NO: 14651 - DNA, 26 bp, Artificial Sequence
  Chr13_6 Forward Primer
tcctttgtacatatttctctgtcacc

SEQ ID NO: 14652 - DNA, 20 bp, Artificial Sequence
  Chr13_6 Forward Primer
tgccaactttttgaatgggt

SEQ ID NO: 14653 - DNA, 19 bp, Artificial Sequence
  Chr13_6 Forward Primer
cggctgctgtcagacctta

SEQ ID NO: 14654 - DNA, 20 bp, Artificial Sequence
  Chr13_6 Forward Primer
cacggagggaaaaatctgaa

SEQ ID NO: 14655 - DNA, 20 bp, Artificial Sequence
  Chr13_6 Forward Primer
gcaggaagcatgtgttgcta

SEQ ID NO: 14656 - DNA, 20 bp, Artificial Sequence
  Chr13_6 Forward Primer
aggctgacatccctcatctg

SEQ ID NO: 14657 - DNA, 20 bp, Artificial Sequence
  Chr13_6 Forward Primer
cctccttttcctccccacta

SEQ ID NO: 14658 - DNA, 20 bp, Artificial Sequence
  Chr13_6 Forward Primer
aatcaccccttaaaaggcac

SEQ ID NO: 14659 - DNA, 20 bp, Artificial Sequence
  Chr13_6 Forward Primer
tcaccaatgtgaacatccca

SEQ ID NO: 14660 - DNA, 20 bp, Artificial Sequence
  Chr13_6 Forward Primer
tgacacagccctctcagcta

SEQ ID NO: 14661 - DNA, 20 bp, Artificial Sequence
  Chr13_6 Forward Primer
ctggctgtttgatgggttct

SEQ ID NO: 14662 - DNA, 20 bp, Artificial Sequence
  Chr13_6 Forward Primer
ggcctgaaagtgaggatttg

SEQ ID NO: 14663 - DNA, 20 bp, Artificial Sequence
  Chr13_6 Forward Primer
aaagccctctatgtcctggc

SEQ ID NO: 14664 - DNA, 20 bp, Artificial Sequence
  Chr13_6 Forward Primer
gagtctgccatccctagctg

SEQ ID NO: 14665 - DNA, 20 bp, Artificial Sequence
  Chr13_6 Forward Primer
aagccacaggagaaacatgg

SEQ ID NO: 14666 - DNA, 21 bp, Artificial Sequence
  Chr13_6 Forward Primer
gttgttcccaaacaaagttgc

SEQ ID NO: 14667 - DNA, 21 bp, Artificial Sequence
  Chr13_6 Forward Primer
aaggaatctgtggttttgcat

SEQ ID NO: 14668 - DNA, 20 bp, Artificial Sequence
  Chr13_6 Forward Primer
cctccaattggtcttcagga

SEQ ID NO: 14669 - DNA, 20 bp, Artificial Sequence
  Chr13_6 Forward Primer
ccaaagagccatgcaaactt

SEQ ID NO: 14670 - DNA, 21 bp, Artificial Sequence
  Chr13_6 Forward Primer
gggtgagaatgtagccatttg

SEQ ID NO: 14671 - DNA, 22 bp, Artificial Sequence
  Chr13_6 Forward Primer
aaacggcctttaaattcttcaa

SEQ ID NO: 14672 - DNA, 23 bp, Artificial Sequence
  Chr13_6 Forward Primer
gacatcaagatgacttccaaatg

SEQ ID NO: 14673 - DNA, 20 bp, Artificial Sequence
  Chr13_6 Forward Primer
tattcagagagacaggcggc

SEQ ID NO: 14674 - DNA, 21 bp, Artificial Sequence
  Chr13_6 Forward Primer
catcatggcagtatttgaaca

SEQ ID NO: 14675 - DNA, 20 bp, Artificial Sequence
  Chr13_6 Forward Primer
ctatttttccccaagtggca

SEQ ID NO: 14676 - DNA, 23 bp, Artificial Sequence
  Chr13_6 Forward Primer
catgcatgtcttcactcttgaat

SEQ ID NO: 14677 - DNA, 22 bp, Artificial Sequence
  Chr13_6 Forward Primer
aaggaacaccatagggaagtca

SEQ ID NO: 14678 - DNA, 22 bp, Artificial Sequence
  Chr13_6 Forward Primer
ttctaaacaacctcttggggtc

SEQ ID NO: 14679 - DNA, 20 bp, Artificial Sequence
  Chr13_6 Forward Primer
ctttgaaacagatgaccccc

SEQ ID NO: 14680 - DNA, 20 bp, Artificial Sequence
  Chr13_6 Forward Primer
agggcacaatgaggaagaaa

SEQ ID NO: 14681 - DNA, 20 bp, Artificial Sequence
  Chr13_6 Forward Primer
tcagtgaattgactccacgc

SEQ ID NO: 14682 - DNA, 26 bp, Artificial Sequence
  Chr13_6 Forward Primer
tcctcaaatgttctacttttctcaat

SEQ ID NO: 14683 - DNA, 20 bp, Artificial Sequence
  Chr13_6 Forward Primer
tgagaggccagttgtagtgc

SEQ ID NO: 14684 - DNA, 22 bp, Artificial Sequence
  Chr13_6 Forward Primer
tcaggaagaattaccaatgtgc

SEQ ID NO: 14685 - DNA, 23 bp, Artificial Sequence
  Chr13_6 Forward Primer
tgatccaatgacttctcttgacc

SEQ ID NO: 14686 - DNA, 23 bp, Artificial Sequence
  Chr13_6 Forward Primer
tcatggatggatttgagattctt

SEQ ID NO: 14687 - DNA, 22 bp, Artificial Sequence
  Chr13_6 Forward Primer
cctggaatatgtggcataatga

SEQ ID NO: 14688 - DNA, 20 bp, Artificial Sequence
  Chr13_6 Forward Primer
cacacggagtctgttgcatt

SEQ ID NO: 14689 - DNA, 22 bp, Artificial Sequence
  Chr13_6 Forward Primer
tcctagctcagggaaagaagaa

SEQ ID NO: 14690 - DNA, 20 bp, Artificial Sequence
  Chr13_6 Forward Primer
cgcagaaatccttcctctgt

SEQ ID NO: 14691 - DNA, 20 bp, Artificial Sequence
  Chr13_6 Forward Primer
cagcctcaattccacttcca

SEQ ID NO: 14692 - DNA, 20 bp, Artificial Sequence
  Chr13_6 Forward Primer
cacctagcagcatttggaca

SEQ ID NO: 14693 - DNA, 25 bp, Artificial Sequence
  Chr13_6 Forward Primer
tgccaagaatagtaaaggagacttc

SEQ ID NO: 14694 - DNA, 20 bp, Artificial Sequence
  Chr13_6 Forward Primer
ccaagtttaggaggggaagc

SEQ ID NO: 14695 - DNA, 22 bp, Artificial Sequence
  Chr13_6 Forward Primer
aatcagatttttatgggcttgg

SEQ ID NO: 14696 - DNA, 20 bp, Artificial Sequence
  Chr13_6 Forward Primer
caccaggagcttttgttggt

SEQ ID NO: 14697 - DNA, 21 bp, Artificial Sequence
  Chr13_6 Forward Primer
cagaagtgatccattagccca

SEQ ID NO: 14698 - DNA, 24 bp, Artificial Sequence
  Chr13_6 Forward Primer
tttgtgataatgataagaatgcca

SEQ ID NO: 14699 - DNA, 20 bp, Artificial Sequence
  Chr13_6 Forward Primer
agagaaaggcatgggtagca

SEQ ID NO: 14700 - DNA, 20 bp, Artificial Sequence
  Chr13_6 Forward Primer
catgagctgtgaagctggaa

SEQ ID NO: 14701 - DNA, 20 bp, Artificial Sequence
  Chr13_6 Forward Primer
tcccacgggacatctaaaag

SEQ ID NO: 14702 - DNA, 20 bp, Artificial Sequence
  Chr13_6 Forward Primer
gcctgtgagaaaagctcctt

SEQ ID NO: 14703 - DNA, 20 bp, Artificial Sequence
  Chr13_6 Forward Primer
gcacccaattgctttgagtt

SEQ ID NO: 14704 - DNA, 20 bp, Artificial Sequence
  Chr13_6 Forward Primer
ctagggtgaaagggagggag

SEQ ID NO: 14705 - DNA, 21 bp, Artificial Sequence
  Chr13_6 Reverse Primer
attacatagggctctttgggg

SEQ ID NO: 14706 - DNA, 20 bp, Artificial Sequence
  Chr13_6 Reverse Primer
tgcatgcatcatttcctttt

SEQ ID NO: 14707 - DNA, 20 bp, Artificial Sequence
  Chr13_6 Reverse Primer
catgcagtgcaggcagtatt

SEQ ID NO: 14708 - DNA, 20 bp, Artificial Sequence
  Chr13_6 Reverse Primer
attgatgccaagcctacgtc

SEQ ID NO: 14709 - DNA, 20 bp, Artificial Sequence
  Chr13_6 Reverse Primer
tatttcctccttgcccttcc

SEQ ID NO: 14710 - DNA, 20 bp, Artificial Sequence
  Chr13_6 Reverse Primer
aacagctttggcaacattcc

SEQ ID NO: 14711 - DNA, 22 bp, Artificial Sequence
  Chr13_6 Reverse Primer
ccctaattctgctgtagtgtgg

SEQ ID NO: 14712 - DNA, 20 bp, Artificial Sequence
  Chr13_6 Reverse Primer
cctctgccattgtccctaga

SEQ ID NO: 14713 - DNA, 20 bp, Artificial Sequence
  Chr13_6 Reverse Primer
aaaacccaccatgaagcatt

SEQ ID NO: 14714 - DNA, 21 bp, Artificial Sequence
  Chr13_6 Reverse Primer
ccctcctacatttcagcttcc

SEQ ID NO: 14715 - DNA, 20 bp, Artificial Sequence
  Chr13_6 Reverse Primer
gccactgtccaagcctatgt

SEQ ID NO: 14716 - DNA, 20 bp, Artificial Sequence
  Chr13_6 Reverse Primer
tttctgtttttgctcgctca

SEQ ID NO: 14717 - DNA, 20 bp, Artificial Sequence
  Chr13_6 Reverse Primer
caggcagtatgccatctgag

SEQ ID NO: 14718 - DNA, 24 bp, Artificial Sequence
  Chr13_6 Reverse Primer
catctataattgcagcatttcagg

SEQ ID NO: 14719 - DNA, 20 bp, Artificial Sequence
  Chr13_6 Reverse Primer
cacagcaagcttgaaagcac

SEQ ID NO: 14720 - DNA, 20 bp, Artificial Sequence
  Chr13_6 Reverse Primer
gtttccttcacaaagggcag

SEQ ID NO: 14721 - DNA, 20 bp, Artificial Sequence
  Chr13_6 Reverse Primer
ttcacgtgaccgtgattcat

SEQ ID NO: 14722 - DNA, 23 bp, Artificial Sequence
  Chr13_6 Reverse Primer
ttcatatgattgatgatgaggga

SEQ ID NO: 14723 - DNA, 24 bp, Artificial Sequence
  Chr13_6 Reverse Primer
aaacctgttaattcaagcatatca

SEQ ID NO: 14724 - DNA, 21 bp, Artificial Sequence
  Chr13_6 Reverse Primer
cattaatgatggcaacaggtg

SEQ ID NO: 14725 - DNA, 20 bp, Artificial Sequence
  Chr13_6 Reverse Primer
cattagggtttggaagaggc

SEQ ID NO: 14726 - DNA, 20 bp, Artificial Sequence
  Chr13_6 Reverse Primer
tcaggtaggggagcagagag

SEQ ID NO: 14727 - DNA, 23 bp, Artificial Sequence
  Chr13_6 Reverse Primer
ccagaaagattctgacacatgaa

SEQ ID NO: 14728 - DNA, 18 bp, Artificial Sequence
  Chr13_6 Reverse Primer
ttttcagggagggggtgt

SEQ ID NO: 14729 - DNA, 21 bp, Artificial Sequence
  Chr13_6 Reverse Primer
ttttcaaacagatgatgctgc

SEQ ID NO: 14730 - DNA, 20 bp, Artificial Sequence
  Chr13_6 Reverse Primer
ccattcctgcagaaacaaaa

SEQ ID NO: 14731 - DNA, 20 bp, Artificial Sequence
  Chr13_6 Reverse Primer
gcaagggtacactaatgccc

SEQ ID NO: 14732 - DNA, 22 bp, Artificial Sequence
  Chr13_6 Reverse Primer
tcccttccttaatgacaacaaa

SEQ ID NO: 14733 - DNA, 20 bp, Artificial Sequence
  Chr13_6 Reverse Primer
tcttgtgacaggttggctga

SEQ ID NO: 14734 - DNA, 20 bp, Artificial Sequence
  Chr13_6 Reverse Primer
cagtctgctcttggcatctg

SEQ ID NO: 14735 - DNA, 20 bp, Artificial Sequence
  Chr13_6 Reverse Primer
gctgggtaagacgacaggaa

SEQ ID NO: 14736 - DNA, 20 bp, Artificial Sequence
  Chr13_6 Reverse Primer
cccttcagaggggtgctact

SEQ ID NO: 14737 - DNA, 20 bp, Artificial Sequence
  Chr13_6 Reverse Primer
gtgaggagatttcagggcag

SEQ ID NO: 14738 - DNA, 20 bp, Artificial Sequence
  Chr13_6 Reverse Primer
ttctgagcccaaaactccat

SEQ ID NO: 14739 - DNA, 20 bp, Artificial Sequence
  Chr13_6 Reverse Primer
cttcctgaacaccttcaccc

SEQ ID NO: 14740 - DNA, 20 bp, Artificial Sequence
  Chr13_6 Reverse Primer
acgccaaaatgaaccaagag

SEQ ID NO: 14741 - DNA, 24 bp, Artificial Sequence
  Chr13_6 Reverse Primer
aaagcaaaacacattaaaacatgg

SEQ ID NO: 14742 - DNA, 21 bp, Artificial Sequence
  Chr13_6 Reverse Primer
cagaattgaagcaaaatgcaa

SEQ ID NO: 14743 - DNA, 20 bp, Artificial Sequence
  Chr13_6 Reverse Primer
aaattgcaaaggaccagcag

SEQ ID NO: 14744 - DNA, 24 bp, Artificial Sequence
  Chr13_6 Reverse Primer
tgtcagctctctactttcaatcca

SEQ ID NO: 14745 - DNA, 20 bp, Artificial Sequence
  Chr13_6 Reverse Primer
tagcatctggatgttgtggg

SEQ ID NO: 14746 - DNA, 20 bp, Artificial Sequence
  Chr13_6 Reverse Primer
tagccctttcatatgctgcc

SEQ ID NO: 14747 - DNA, 21 bp, Artificial Sequence
  Chr13_6 Reverse Primer
ttgaggataccattttgcctc

SEQ ID NO: 14748 - DNA, 20 bp, Artificial Sequence
  Chr13_6 Reverse Primer
ttgctgaagcaatgaaggtg

SEQ ID NO: 14749 - DNA, 20 bp, Artificial Sequence
  Chr13_6 Reverse Primer
tgtagcaatcaatctccccc

SEQ ID NO: 14750 - DNA, 20 bp, Artificial Sequence
  Chr13_6 Reverse Primer
catagggcaagaaggttcca

SEQ ID NO: 14751 - DNA, 20 bp, Artificial Sequence
  Chr13_6 Reverse Primer
aatcctgtgccatggttttc

SEQ ID NO: 14752 - DNA, 20 bp, Artificial Sequence
  Chr13_6 Reverse Primer
ccagctgggattggaaataa

SEQ ID NO: 14753 - DNA, 21 bp, Artificial Sequence
  Chr13_6 Reverse Primer
ccaatctgaaggtcttgttgc

SEQ ID NO: 14754 - DNA, 21 bp, Artificial Sequence
  Chr13_6 Reverse Primer
tgaggaagaaagatttgctgg

SEQ ID NO: 14755 - DNA, 20 bp, Artificial Sequence
  Chr13_6 Reverse Primer
ttggtccaaggccatatcat

SEQ ID NO: 14756 - DNA, 22 bp, Artificial Sequence
  Chr13_6 Reverse Primer
tgagtgtgtgtgtgtgtgtgtg

SEQ ID NO: 14757 - DNA, 20 bp, Artificial Sequence
  Chr13_6 Reverse Primer
ttcgctttcatgaggtttgg

SEQ ID NO: 14758 - DNA, 22 bp, Artificial Sequence
  Chr13_6 Reverse Primer
aagaaggaatgaagtcgtttgc

SEQ ID NO: 14759 - DNA, 20 bp, Artificial Sequence
  Chr13_6 Reverse Primer
atgcaaacacaagcaagtgg

SEQ ID NO: 14760 - DNA, 20 bp, Artificial Sequence
  Chr13_6 Reverse Primer
cccccagaaaagagcaataa

SEQ ID NO: 14761 - DNA, 20 bp, Artificial Sequence
  Chr13_6 Reverse Primer
aaatgcagagtgggttgagg

SEQ ID NO: 14762 - DNA, 22 bp, Artificial Sequence
  Chr13_6 Reverse Primer
gtgaagaaaggaaggaaaaggg

SEQ ID NO: 14763 - DNA, 20 bp, Artificial Sequence
  Chr13_6 Reverse Primer
tgcctaggatctcaacctcc

SEQ ID NO: 14764 - DNA, 21 bp, Artificial Sequence
  Chr13_6 Reverse Primer
agcaagcataagtttgcatca

SEQ ID NO: 14765 - DNA, 20 bp, Artificial Sequence
  Chr13_6 Reverse Primer
gagcatttatggagggggag

SEQ ID NO: 14766 - DNA, 20 bp, Artificial Sequence
  Chr13_6 Reverse Primer
tgcctgcatctcttccaaaa

SEQ ID NO: 14767 - DNA, 21 bp, Artificial Sequence
  Chr13_6 Reverse Primer
gggcctttcaagttaatgagc

SEQ ID NO: 14768 - DNA, 24 bp, Artificial Sequence
  Chr13_6 Reverse Primer
tgcatgtttaaaatggttttgttt

SEQ ID NO: 14769 - DNA, 20 bp, Artificial Sequence
  Chr13_6 Reverse Primer
catttcagctggagaatccg

SEQ ID NO: 14770 - DNA, 23 bp, Artificial Sequence
  Chr13_6 Reverse Primer
cccactttattcatctgtcttgg

SEQ ID NO: 14771 - DNA, 21 bp, Artificial Sequence
  Chr13_6 Reverse Primer
gcaccttcaacagagttttgc

SEQ ID NO: 14772 - DNA, 21 bp, Artificial Sequence
  Chr13_6 Reverse Primer
cattaatggcctcaaggatca

SEQ ID NO: 14773 - DNA, 22 bp, Artificial Sequence
  Chr13_6 Reverse Primer
agacctcatagtgccaagttca

SEQ ID NO: 14774 - DNA, 20 bp, Artificial Sequence
  Chr13_6 Reverse Primer
agaatccgtgtggtcagtgc

SEQ ID NO: 14775 - DNA, 22 bp, Artificial Sequence
  Chr13_6 Reverse Primer
tgtgcataaagttcaatggtca

SEQ ID NO: 14776 - DNA, 20 bp, Artificial Sequence
  Chr13_6 Reverse Primer
gggccttagaccaacatgaa

SEQ ID NO: 14777 - DNA, 21 bp, Artificial Sequence
  Chr13_6 Reverse Primer
gactgaaatgccagtgaggtt

SEQ ID NO: 14778 - DNA, 20 bp, Artificial Sequence
  Chr13_6 Reverse Primer
atggctcatcccaaacaaga

SEQ ID NO: 14779 - DNA, 20 bp, Artificial Sequence
  Chr13_6 Reverse Primer
gtgccaagataagggcttca

SEQ ID NO: 14780 - DNA, 22 bp, Artificial Sequence
  Chr13_6 Reverse Primer
cagacattgcgtctaaaatgaa

SEQ ID NO: 14781 - DNA, 20 bp, Artificial Sequence
  Chr13_6 Reverse Primer
gtcggtgtttctcacgaagc

SEQ ID NO: 14782 - DNA, 20 bp, Artificial Sequence
  Chr13_6 Reverse Primer
catgggagttcagtctttgg

SEQ ID NO: 14783 - DNA, 20 bp, Artificial Sequence
  Chr13_6 Reverse Primer
aaggggagaaagtccgctta

SEQ ID NO: 14784 - DNA, 20 bp, Artificial Sequence
  Chr13_6 Reverse Primer
gcctgaggcaataaaggttc

SEQ ID NO: 14785 - DNA, 20 bp, Artificial Sequence
  Chr13_6 Reverse Primer
cccctcctcccttttgtagt

SEQ ID NO: 14786 - DNA, 20 bp, Artificial Sequence
  Chr13_6 Reverse Primer
cagtgccagctgaaaaagtg

SEQ ID NO: 14787 - DNA, 21 bp, Artificial Sequence
  Chr13_6 Reverse Primer
tgagagcattgtgatttgtgg

SEQ ID NO: 14788 - DNA, 20 bp, Artificial Sequence
  Chr13_6 Reverse Primer
catccttgaccccagaagaa

SEQ ID NO: 14789 - DNA, 21 bp, Artificial Sequence
  Chr13_6 Reverse Primer
tcaaacctgctcgttgattct

SEQ ID NO: 14790 - DNA, 21 bp, Artificial Sequence
  Chr13_6 Reverse Primer
cgcacatacatgcaacttgtc

SEQ ID NO: 14791 - DNA, 18 bp, Artificial Sequence
  Chr13_6 Reverse Primer
cattgcaggcatgagcac

SEQ ID NO: 14792 - DNA, 21 bp, Artificial Sequence
  Chr13_6 Reverse Primer
tcaaaggcaatttcttgaagg

SEQ ID NO: 14793 - DNA, 21 bp, Artificial Sequence
  Chr13_6 Reverse Primer
cggaggattttctattttcca

SEQ ID NO: 14794 - DNA, 23 bp, Artificial Sequence
  Chr13_6 Reverse Primer
gcaatttttacaagacacctgag

SEQ ID NO: 14795 - DNA, 20 bp, Artificial Sequence
  Chr13_6 Reverse Primer
cacatttgtggcagtgttca

SEQ ID NO: 14796 - DNA, 23 bp, Artificial Sequence
  Chr13_6 Reverse Primer
accaacagatagcagaaaggaaa

SEQ ID NO: 14797 - DNA, 20 bp, Artificial Sequence
  Chr13_6 Reverse Primer
tgctccacaataacaaccca

SEQ ID NO: 14798 - DNA, 24 bp, Artificial Sequence
  Chr13_6 Reverse Primer
tctgtacaaggaccaagactttca

SEQ ID NO: 14799 - DNA, 20 bp, Artificial Sequence
  Chr13_6 Reverse Primer
aaccaccccactgttactgg

SEQ ID NO: 14800 - DNA, 20 bp, Artificial Sequence
  Chr13_6 Reverse Primer
gagaggggattggaacacag

SEQ ID NO: 14801 - DNA, 22 bp, Artificial Sequence
  Chr13_7 Forward Primer
gctttgaggacaacatacatgc

SEQ ID NO: 14802 - DNA, 25 bp, Artificial Sequence
  Chr13_7 Forward Primer
tgaaacaaattggattttaaaagga

SEQ ID NO: 14803 - DNA, 20 bp, Artificial Sequence
  Chr13_7 Forward Primer
tcccctgactttttctgcac

SEQ ID NO: 14804 - DNA, 22 bp, Artificial Sequence
  Chr13_7 Forward Primer
actttagctacacagcaaccct

SEQ ID NO: 14805 - DNA, 20 bp, Artificial Sequence
  Chr13_7 Forward Primer
ttggcagagcctggaaatta

SEQ ID NO: 14806 - DNA, 20 bp, Artificial Sequence
  Chr13_7 Forward Primer
gatgccaatcatggcagtta

SEQ ID NO: 14807 - DNA, 21 bp, Artificial Sequence
  Chr13_7 Forward Primer
cggatttttgatgaacaagga

SEQ ID NO: 14808 - DNA, 26 bp, Artificial Sequence
  Chr13_7 Forward Primer
tcattcaacaacaacaatattgactc

SEQ ID NO: 14809 - DNA, 20 bp, Artificial Sequence
  Chr13_7 Forward Primer
gccattgggtgtgatggtag

SEQ ID NO: 14810 - DNA, 20 bp, Artificial Sequence
  Chr13_7 Forward Primer
tggaaggctgatgaatctcc

SEQ ID NO: 14811 - DNA, 22 bp, Artificial Sequence
  Chr13_7 Forward Primer
agcaaaaacaagactcaggaaa

SEQ ID NO: 14812 - DNA, 20 bp, Artificial Sequence
  Chr13_7 Forward Primer
tgctggaagagcacagaaca

SEQ ID NO: 14813 - DNA, 22 bp, Artificial Sequence
  Chr13_7 Forward Primer
gctgcacaactttcatagtcca

SEQ ID NO: 14814 - DNA, 23 bp, Artificial Sequence
  Chr13_7 Forward Primer
aagatctgccaagactgtgtacc

SEQ ID NO: 14815 - DNA, 20 bp, Artificial Sequence
  Chr13_7 Forward Primer
tgtgcaaatggacaaggaga

SEQ ID NO: 14816 - DNA, 21 bp, Artificial Sequence
  Chr13_7 Forward Primer
tgcctttgcttgttctcattt

SEQ ID NO: 14817 - DNA, 20 bp, Artificial Sequence
  Chr13_7 Forward Primer
ggcaccctgtactggatttg

SEQ ID NO: 14818 - DNA, 20 bp, Artificial Sequence
  Chr13_7 Forward Primer
agtggtgttccactgggaag

SEQ ID NO: 14819 - DNA, 20 bp, Artificial Sequence
  Chr13_7 Forward Primer
tcagtgcagactaaggtcgc

SEQ ID NO: 14820 - DNA, 20 bp, Artificial Sequence
  Chr13_7 Forward Primer
gtcggctggctaaatgaaag

SEQ ID NO: 14821 - DNA, 20 bp, Artificial Sequence
  Chr13_7 Forward Primer
agtcctgccttattgggctt

SEQ ID NO: 14822 - DNA, 20 bp, Artificial Sequence
  Chr13_7 Forward Primer
tcctgccaatgttggtgata

SEQ ID NO: 14823 - DNA, 21 bp, Artificial Sequence
  Chr13_7 Forward Primer
tgaaccttcaaggaagtgcat

SEQ ID NO: 14824 - DNA, 20 bp, Artificial Sequence
  Chr13_7 Forward Primer
gtggcattgatagttggcct

SEQ ID NO: 14825 - DNA, 22 bp, Artificial Sequence
  Chr13_7 Forward Primer
ctcacactgggacaaaagaatg

SEQ ID NO: 14826 - DNA, 20 bp, Artificial Sequence
  Chr13_7 Forward Primer
tcatgttcatgctgctgtca

SEQ ID NO: 14827 - DNA, 26 bp, Artificial Sequence
  Chr13_7 Forward Primer
tggcatctgattttatcttaatgtat

SEQ ID NO: 14828 - DNA, 21 bp, Artificial Sequence
  Chr13_7 Forward Primer
tcatgctccttttgattgagc

SEQ ID NO: 14829 - DNA, 19 bp, Artificial Sequence
  Chr13_7 Forward Primer
ctgtttgtgggcccttttc

SEQ ID NO: 14830 - DNA, 22 bp, Artificial Sequence
  Chr13_7 Forward Primer
tctctgatgcattttcacttgg

SEQ ID NO: 14831 - DNA, 22 bp, Artificial Sequence
  Chr13_7 Forward Primer
agctgagaagtcttgcagaatg

SEQ ID NO: 14832 - DNA, 20 bp, Artificial Sequence
  Chr13_7 Forward Primer
aatgtcttcccattccgatg

SEQ ID NO: 14833 - DNA, 22 bp, Artificial Sequence
  Chr13_7 Forward Primer
ttctgccacttgactctttgaa

SEQ ID NO: 14834 - DNA, 20 bp, Artificial Sequence
  Chr13_7 Forward Primer
tagctttgggtgcacatcat

SEQ ID NO: 14835 - DNA, 20 bp, Artificial Sequence
  Chr13_7 Forward Primer
tggatggtcaaggaagtgaa

SEQ ID NO: 14836 - DNA, 20 bp, Artificial Sequence
  Chr13_7 Forward Primer
taatgactgctgccaccaag

SEQ ID NO: 14837 - DNA, 20 bp, Artificial Sequence
  Chr13_7 Forward Primer
aagcagaagtagggggtggt

SEQ ID NO: 14838 - DNA, 21 bp, Artificial Sequence
  Chr13_7 Forward Primer
tgtggacacaggtctttcaga

SEQ ID NO: 14839 - DNA, 20 bp, Artificial Sequence
  Chr13_7 Forward Primer
tcgattgtggttagctttgc

SEQ ID NO: 14840 - DNA, 24 bp, Artificial Sequence
  Chr13_7 Forward Primer
ttgaaaatttgtgtatgggaagaa

SEQ ID NO: 14841 - DNA, 20 bp, Artificial Sequence
  Chr13_7 Forward Primer
ggaagatgttggctttggag

SEQ ID NO: 14842 - DNA, 20 bp, Artificial Sequence
  Chr13_7 Forward Primer
gttgggacaggtccaaagat

SEQ ID NO: 14843 - DNA, 20 bp, Artificial Sequence
  Chr13_7 Forward Primer
ctgcagctcccagaaacagt

SEQ ID NO: 14844 - DNA, 21 bp, Artificial Sequence
  Chr13_7 Forward Primer
ggaaggaaataaaggcaggaa

SEQ ID NO: 14845 - DNA, 21 bp, Artificial Sequence
  Chr13_7 Forward Primer
cgcacagttccacatatttcc

SEQ ID NO: 14846 - DNA, 20 bp, Artificial Sequence
  Chr13_7 Forward Primer
agttacgctgctcaaaagcc

SEQ ID NO: 14847 - DNA, 22 bp, Artificial Sequence
  Chr13_7 Forward Primer
catgacctctttcatgttcagc

SEQ ID NO: 14848 - DNA, 20 bp, Artificial Sequence
  Chr13_7 Forward Primer
cccatgccatactgtcttca

SEQ ID NO: 14849 - DNA, 20 bp, Artificial Sequence
  Chr13_7 Forward Primer
cataatggtctggtgttgcc

SEQ ID NO: 14850 - DNA, 21 bp, Artificial Sequence
  Chr13_7 Forward Primer
ggtatgatttatgcccaggct

SEQ ID NO: 14851 - DNA, 23 bp, Artificial Sequence
  Chr13_7 Forward Primer
tggcatagaattcatcctaccac

SEQ ID NO: 14852 - DNA, 20 bp, Artificial Sequence
  Chr13_7 Forward Primer
tcttgtttgttttggcgaag

SEQ ID NO: 14853 - DNA, 22 bp, Artificial Sequence
  Chr13_7 Forward Primer
ctggatctacatcacacaagca

SEQ ID NO: 14854 - DNA, 21 bp, Artificial Sequence
  Chr13_7 Forward Primer
tttccatgcacaaagatgtca

SEQ ID NO: 14855 - DNA, 21 bp, Artificial Sequence
  Chr13_7 Forward Primer
ggcaatattttctggattggg

SEQ ID NO: 14856 - DNA, 20 bp, Artificial Sequence
  Chr13_7 Forward Primer
caggccaaggcactcatatt

SEQ ID NO: 14857 - DNA, 20 bp, Artificial Sequence
  Chr13_7 Forward Primer
gtgtccagctctggttctca

SEQ ID NO: 14858 - DNA, 23 bp, Artificial Sequence
  Chr13_7 Forward Primer
gaattgatcttgaaattttggca

SEQ ID NO: 14859 - DNA, 20 bp, Artificial Sequence
  Chr13_7 Forward Primer
aactggaaaagggaagggaa

SEQ ID NO: 14860 - DNA, 20 bp, Artificial Sequence
  Chr13_7 Forward Primer
ggaggtcatcagccacaaat

SEQ ID NO: 14861 - DNA, 20 bp, Artificial Sequence
  Chr13_7 Forward Primer
tgagcatttgttttgcatcc

SEQ ID NO: 14862 - DNA, 20 bp, Artificial Sequence
  Chr13_7 Forward Primer
gcagactccaccattggttc

SEQ ID NO: 14863 - DNA, 20 bp, Artificial Sequence
  Chr13_7 Forward Primer
tgggagtcaatttggaaaaa

SEQ ID NO: 14864 - DNA, 21 bp, Artificial Sequence
  Chr13_7 Forward Primer
gccaggaataccatcattcaa

SEQ ID NO: 14865 - DNA, 20 bp, Artificial Sequence
  Chr13_7 Forward Primer
actgaattgaggccatggtt

SEQ ID NO: 14866 - DNA, 20 bp, Artificial Sequence
  Chr13_7 Forward Primer
ctcaattgaatgtgttcccg

SEQ ID NO: 14867 - DNA, 21 bp, Artificial Sequence
  Chr13_7 Forward Primer
ccttcttgcttcaatctttgc

SEQ ID NO: 14868 - DNA, 21 bp, Artificial Sequence
  Chr13_7 Forward Primer
ccagaacttccttcttggtga

SEQ ID NO: 14869 - DNA, 20 bp, Artificial Sequence
  Chr13_7 Forward Primer
ccaggcagatgctgaacata

SEQ ID NO: 14870 - DNA, 20 bp, Artificial Sequence
  Chr13_7 Forward Primer
agcggattatctggggaagt

SEQ ID NO: 14871 - DNA, 20 bp, Artificial Sequence
  Chr13_7 Forward Primer
acaaggctttgccagaactt

SEQ ID NO: 14872 - DNA, 23 bp, Artificial Sequence
  Chr13_7 Forward Primer
taattcactgaagtgagtgcagc

SEQ ID NO: 14873 - DNA, 20 bp, Artificial Sequence
  Chr13_7 Forward Primer
atcatacccctcacaccaaa

SEQ ID NO: 14874 - DNA, 20 bp, Artificial Sequence
  Chr13_7 Forward Primer
tatagcaggaccttggcacc

SEQ ID NO: 14875 - DNA, 20 bp, Artificial Sequence
  Chr13_7 Forward Primer
tcttccctcctctctacgga

SEQ ID NO: 14876 - DNA, 21 bp, Artificial Sequence
  Chr13_7 Forward Primer
cctgaaccaaaggagtagtgg

SEQ ID NO: 14877 - DNA, 20 bp, Artificial Sequence
  Chr13_7 Forward Primer
ggtatgcctctgggtcaaaa

SEQ ID NO: 14878 - DNA, 23 bp, Artificial Sequence
  Chr13_7 Forward Primer
ttcagtttctggcatataacggt

SEQ ID NO: 14879 - DNA, 25 bp, Artificial Sequence
  Chr13_7 Forward Primer
aattgaattatccactgtttttcaa

SEQ ID NO: 14880 - DNA, 22 bp, Artificial Sequence
  Chr13_7 Forward Primer
cattggaattttccttcagctt

SEQ ID NO: 14881 - DNA, 20 bp, Artificial Sequence
  Chr13_7 Forward Primer
gccttcccaaactccaaaat

SEQ ID NO: 14882 - DNA, 22 bp, Artificial Sequence
  Chr13_7 Forward Primer
gcagatatccaagacagtgcag

SEQ ID NO: 14883 - DNA, 21 bp, Artificial Sequence
  Chr13_7 Forward Primer
ttgaacctgaaaagaacaggc

SEQ ID NO: 14884 - DNA, 20 bp, Artificial Sequence
  Chr13_7 Forward Primer
gggggcactcacagttaaaa

SEQ ID NO: 14885 - DNA, 26 bp, Artificial Sequence
  Chr13_7 Forward Primer
tcctaaacaaagacaagttatttcca

SEQ ID NO: 14886 - DNA, 23 bp, Artificial Sequence
  Chr13_7 Forward Primer
aaaatccactacatgtttccctg

SEQ ID NO: 14887 - DNA, 27 bp, Artificial Sequence
  Chr13_7 Forward Primer
catgaaaatgtaatgtccaatacaaaa

SEQ ID NO: 14888 - DNA, 23 bp, Artificial Sequence
  Chr13_7 Forward Primer
tttggtgcatcttacaagtctga

SEQ ID NO: 14889 - DNA, 20 bp, Artificial Sequence
  Chr13_7 Forward Primer
catcaacacacatggccaac

SEQ ID NO: 14890 - DNA, 20 bp, Artificial Sequence
  Chr13_7 Forward Primer
ttggtgaattaggcaggctt

SEQ ID NO: 14891 - DNA, 20 bp, Artificial Sequence
  Chr13_7 Forward Primer
tgcatatgagaacctggcaa

SEQ ID NO: 14892 - DNA, 20 bp, Artificial Sequence
  Chr13_7 Forward Primer
tggatgactcttcgttgtgg

SEQ ID NO: 14893 - DNA, 27 bp, Artificial Sequence
  Chr13_7 Forward Primer
tgtcctattttatcttttgttttcaca

SEQ ID NO: 14894 - DNA, 22 bp, Artificial Sequence
  Chr13_7 Forward Primer
gaagaagccaagttcaaaggaa

SEQ ID NO: 14895 - DNA, 20 bp, Artificial Sequence
  Chr13_7 Forward Primer
ggcattcctggttcaatttc

SEQ ID NO: 14896 - DNA, 21 bp, Artificial Sequence
  Chr13_7 Forward Primer
acttgtgtatggctccaggaa

SEQ ID NO: 14897 - DNA, 23 bp, Artificial Sequence
  Chr13_7 Reverse Primer
tccatggatgaatgaataaagaa

SEQ ID NO: 14898 - DNA, 20 bp, Artificial Sequence
  Chr13_7 Reverse Primer
gggctcaggtttggtacatc

SEQ ID NO: 14899 - DNA, 21 bp, Artificial Sequence
  Chr13_7 Reverse Primer
caactgaaattgcttctggga

SEQ ID NO: 14900 - DNA, 20 bp, Artificial Sequence
  Chr13_7 Reverse Primer
ggctcacacctgctagcttc

SEQ ID NO: 14901 - DNA, 20 bp, Artificial Sequence
  Chr13_7 Reverse Primer
tctggaatacccaacaagcc

SEQ ID NO: 14902 - DNA, 25 bp, Artificial Sequence
  Chr13_7 Reverse Primer
ttcttaggaatctctgaagtccttg

SEQ ID NO: 14903 - DNA, 25 bp, Artificial Sequence
  Chr13_7 Reverse Primer
ccaacaaaagcattcactattatgg

SEQ ID NO: 14904 - DNA, 24 bp, Artificial Sequence
  Chr13_7 Reverse Primer
tgcatataatctgaaaaacattgc

SEQ ID NO: 14905 - DNA, 20 bp, Artificial Sequence
  Chr13_7 Reverse Primer
gtctccgagaaacaatgggt

SEQ ID NO: 14906 - DNA, 22 bp, Artificial Sequence
  Chr13_7 Reverse Primer
ttttgccaattaacttgtgtga

SEQ ID NO: 14907 - DNA, 20 bp, Artificial Sequence
  Chr13_7 Reverse Primer
tagttgtcccaatggttggc

SEQ ID NO: 14908 - DNA, 20 bp, Artificial Sequence
  Chr13_7 Reverse Primer
tggatccacagagcacagag

SEQ ID NO: 14909 - DNA, 22 bp, Artificial Sequence
  Chr13_7 Reverse Primer
gactgcactgttctctcattgc

SEQ ID NO: 14910 - DNA, 24 bp, Artificial Sequence
  Chr13_7 Reverse Primer
gctttttgagatatttaatcccca

SEQ ID NO: 14911 - DNA, 20 bp, Artificial Sequence
  Chr13_7 Reverse Primer
tccaaagttggaagtgggag

SEQ ID NO: 14912 - DNA, 20 bp, Artificial Sequence
  Chr13_7 Reverse Primer
ccagccatcctgcactaatc

SEQ ID NO: 14913 - DNA, 20 bp, Artificial Sequence
  Chr13_7 Reverse Primer
tcatgggatttccgatttct

SEQ ID NO: 14914 - DNA, 20 bp, Artificial Sequence
  Chr13_7 Reverse Primer
tcacggatttgcaggatttt

SEQ ID NO: 14915 - DNA, 22 bp, Artificial Sequence
  Chr13_7 Reverse Primer
cctttttggactttccttcaga

SEQ ID NO: 14916 - DNA, 20 bp, Artificial Sequence
  Chr13_7 Reverse Primer
tggatgcaacctgtgaaaat

SEQ ID NO: 14917 - DNA, 20 bp, Artificial Sequence
  Chr13_7 Reverse Primer
ctcagggaaggaatcagcag

SEQ ID NO: 14918 - DNA, 20 bp, Artificial Sequence
  Chr13_7 Reverse Primer
agaagcaaggcaaagagctg

SEQ ID NO: 14919 - DNA, 22 bp, Artificial Sequence
  Chr13_7 Reverse Primer
tgcatcctatgtggttcagttt

SEQ ID NO: 14920 - DNA, 24 bp, Artificial Sequence
  Chr13_7 Reverse Primer
tctgaaacaaaatctactccaaga

SEQ ID NO: 14921 - DNA, 20 bp, Artificial Sequence
  Chr13_7 Reverse Primer
acaaattccatggggatgag

SEQ ID NO: 14922 - DNA, 24 bp, Artificial Sequence
  Chr13_7 Reverse Primer
tagaaggtaagccagaaaaagaaa

SEQ ID NO: 14923 - DNA, 22 bp, Artificial Sequence
  Chr13_7 Reverse Primer
caactggaaagagacactgacc

SEQ ID NO: 14924 - DNA, 20 bp, Artificial Sequence
  Chr13_7 Reverse Primer
tttcaccaaaactgaaggca

SEQ ID NO: 14925 - DNA, 20 bp, Artificial Sequence
  Chr13_7 Reverse Primer
tgaaatcagagtctgggcaa

SEQ ID NO: 14926 - DNA, 25 bp, Artificial Sequence
  Chr13_7 Reverse Primer
tgagatgtaactttaggacagatgg

SEQ ID NO: 14927 - DNA, 20 bp, Artificial Sequence
  Chr13_7 Reverse Primer
agcccaggaaaaatgttgaa

SEQ ID NO: 14928 - DNA, 20 bp, Artificial Sequence
  Chr13_7 Reverse Primer
tggtggtggtaagcaaaagg

SEQ ID NO: 14929 - DNA, 20 bp, Artificial Sequence
  Chr13_7 Reverse Primer
ccatggcctatcaccaatct

SEQ ID NO: 14930 - DNA, 20 bp, Artificial Sequence
  Chr13_7 Reverse Primer
cagaaccacccctgagaaga

SEQ ID NO: 14931 - DNA, 20 bp, Artificial Sequence
  Chr13_7 Reverse Primer
agtggcagatgaaggagaca

SEQ ID NO: 14932 - DNA, 20 bp, Artificial Sequence
  Chr13_7 Reverse Primer
gcagaggcataaaaaggcag

SEQ ID NO: 14933 - DNA, 20 bp, Artificial Sequence
  Chr13_7 Reverse Primer
tccatttttcccaaatggtg

SEQ ID NO: 14934 - DNA, 20 bp, Artificial Sequence
  Chr13_7 Reverse Primer
acacacacacacgcacacac

SEQ ID NO: 14935 - DNA, 20 bp, Artificial Sequence
  Chr13_7 Reverse Primer
attgccccaacaaacgtaaa

SEQ ID NO: 14936 - DNA, 21 bp, Artificial Sequence
  Chr13_7 Reverse Primer
gggtgattattggtcatgtgc

SEQ ID NO: 14937 - DNA, 20 bp, Artificial Sequence
  Chr13_7 Reverse Primer
tctggagggtcttgtagcca

SEQ ID NO: 14938 - DNA, 23 bp, Artificial Sequence
  Chr13_7 Reverse Primer
tttttcaaaagcatcattgtgtt

SEQ ID NO: 14939 - DNA, 20 bp, Artificial Sequence
  Chr13_7 Reverse Primer
tatcccatgctgggtttgat

SEQ ID NO: 14940 - DNA, 22 bp, Artificial Sequence
  Chr13_7 Reverse Primer
ccgcctttttacatacatgttc

SEQ ID NO: 14941 - DNA, 20 bp, Artificial Sequence
  Chr13_7 Reverse Primer
ttttgtcaattcctgctccc

SEQ ID NO: 14942 - DNA, 20 bp, Artificial Sequence
  Chr13_7 Reverse Primer
gggtggctccactttttaca

SEQ ID NO: 14943 - DNA, 20 bp, Artificial Sequence
  Chr13_7 Reverse Primer
tgggttttcctacacatcca

SEQ ID NO: 14944 - DNA, 20 bp, Artificial Sequence
  Chr13_7 Reverse Primer
ggaatgggtggaaacatgag

SEQ ID NO: 14945 - DNA, 26 bp, Artificial Sequence
  Chr13_7 Reverse Primer
aagattaaacaagactcagttccctt

SEQ ID NO: 14946 - DNA, 21 bp, Artificial Sequence
  Chr13_7 Reverse Primer
ttcagtgctgagtgctttgaa

SEQ ID NO: 14947 - DNA, 26 bp, Artificial Sequence
  Chr13_7 Reverse Primer
ttgggtatagtgtttaatcttgttga

SEQ ID NO: 14948 - DNA, 20 bp, Artificial Sequence
  Chr13_7 Reverse Primer
ggtttcttggcatgcagatt

SEQ ID NO: 14949 - DNA, 27 bp, Artificial Sequence
  Chr13_7 Reverse Primer
aaacaattcataccattaattttgagc

SEQ ID NO: 14950 - DNA, 21 bp, Artificial Sequence
  Chr13_7 Reverse Primer
aaagagaaattgccaagagca

SEQ ID NO: 14951 - DNA, 20 bp, Artificial Sequence
  Chr13_7 Reverse Primer
ttacggctgggattgagaac

SEQ ID NO: 14952 - DNA, 20 bp, Artificial Sequence
  Chr13_7 Reverse Primer
ccaagaaatggctcagagga

SEQ ID NO: 14953 - DNA, 22 bp, Artificial Sequence
  Chr13_7 Reverse Primer
tcaatacactttcagggctttg

SEQ ID NO: 14954 - DNA, 20 bp, Artificial Sequence
  Chr13_7 Reverse Primer
ccaaaacccaggctattcct

SEQ ID NO: 14955 - DNA, 20 bp, Artificial Sequence
  Chr13_7 Reverse Primer
atgctgtgtgtgctctcctg

SEQ ID NO: 14956 - DNA, 20 bp, Artificial Sequence
  Chr13_7 Reverse Primer
ttagcccagatggtgtgtga

SEQ ID NO: 14957 - DNA, 23 bp, Artificial Sequence
  Chr13_7 Reverse Primer
tcgataccttcatctttttgtca

SEQ ID NO: 14958 - DNA, 26 bp, Artificial Sequence
  Chr13_7 Reverse Primer
ttctacagatttatttgttgttctgg

SEQ ID NO: 14959 - DNA, 22 bp, Artificial Sequence
  Chr13_7 Reverse Primer
ttgcttgaaaccattcttttct

SEQ ID NO: 14960 - DNA, 20 bp, Artificial Sequence
  Chr13_7 Reverse Primer
aaggcccagcctaagaaaat

SEQ ID NO: 14961 - DNA, 21 bp, Artificial Sequence
  Chr13_7 Reverse Primer
gaaggaaggaccgagagagaa

SEQ ID NO: 14962 - DNA, 20 bp, Artificial Sequence
  Chr13_7 Reverse Primer
tggaaaattgcgtgttttgt

SEQ ID NO: 14963 - DNA, 20 bp, Artificial Sequence
  Chr13_7 Reverse Primer
ggtggaagtcaagggaaggt

SEQ ID NO: 14964 - DNA, 20 bp, Artificial Sequence
  Chr13_7 Reverse Primer
ggtgtccttcagcctcaaaa

SEQ ID NO: 14965 - DNA, 20 bp, Artificial Sequence
  Chr13_7 Reverse Primer
ttttccatctgagaatcggg

SEQ ID NO: 14966 - DNA, 20 bp, Artificial Sequence
  Chr13_7 Reverse Primer
ggtctgagatttctccccaa

SEQ ID NO: 14967 - DNA, 20 bp, Artificial Sequence
  Chr13_7 Reverse Primer
atttggcttggatgaccaga

SEQ ID NO: 14968 - DNA, 23 bp, Artificial Sequence
  Chr13_7 Reverse Primer
aggcaaaatttcctttcttcttg

SEQ ID NO: 14969 - DNA, 21 bp, Artificial Sequence
  Chr13_7 Reverse Primer
cttgcaggagacagaaatgct

SEQ ID NO: 14970 - DNA, 22 bp, Artificial Sequence
  Chr13_7 Reverse Primer
gcaacaaataactcctgttgct

SEQ ID NO: 14971 - DNA, 23 bp, Artificial Sequence
  Chr13_7 Reverse Primer
ttgcctggtctatttaaaatgtg

SEQ ID NO: 14972 - DNA, 20 bp, Artificial Sequence
  Chr13_7 Reverse Primer
ggaacttgcgcttaggtcag

SEQ ID NO: 14973 - DNA, 24 bp, Artificial Sequence
  Chr13_7 Reverse Primer
tttgaatactgaatgtgctgtcaa

SEQ ID NO: 14974 - DNA, 21 bp, Artificial Sequence
  Chr13_7 Reverse Primer
tgcaacaagcaaactgaaaaa

SEQ ID NO: 14975 - DNA, 24 bp, Artificial Sequence
  Chr13_7 Reverse Primer
cttcttggtaaaaccatatttcct

SEQ ID NO: 14976 - DNA, 20 bp, Artificial Sequence
  Chr13_7 Reverse Primer
tttccgggagaaagtggata

SEQ ID NO: 14977 - DNA, 20 bp, Artificial Sequence
  Chr13_7 Reverse Primer
ctcatctcaccattctgccc

SEQ ID NO: 14978 - DNA, 24 bp, Artificial Sequence
  Chr13_7 Reverse Primer
tttcactctttaaagggacaagtt

SEQ ID NO: 14979 - DNA, 21 bp, Artificial Sequence
  Chr13_7 Reverse Primer
ccaacacacaagaagatgcag

SEQ ID NO: 14980 - DNA, 23 bp, Artificial Sequence
  Chr13_7 Reverse Primer
tgagtgcacgttttagaaagaaa

SEQ ID NO: 14981 - DNA, 25 bp, Artificial Sequence
  Chr13_7 Reverse Primer
ctttgcaaatgtagatttttaacca

SEQ ID NO: 14982 - DNA, 21 bp, Artificial Sequence
  Chr13_7 Reverse Primer
aatgaggatgtgttgcagatg

SEQ ID NO: 14983 - DNA, 27 bp, Artificial Sequence
  Chr13_7 Reverse Primer
aagctaagaacaaatataaaaaggacc

SEQ ID NO: 14984 - DNA, 20 bp, Artificial Sequence
  Chr13_7 Reverse Primer
tgagaggctgaaggaaaacc

SEQ ID NO: 14985 - DNA, 27 bp, Artificial Sequence
  Chr13_7 Reverse Primer
tgccatatatagcttactctcaatcaa

SEQ ID NO: 14986 - DNA, 23 bp, Artificial Sequence
  Chr13_7 Reverse Primer
gcctatgaattcagttacctcca

SEQ ID NO: 14987 - DNA, 22 bp, Artificial Sequence
  Chr13_7 Reverse Primer
gctgagaaaatttcaggtgtga

SEQ ID NO: 14988 - DNA, 21 bp, Artificial Sequence
  Chr13_7 Reverse Primer
acaccattttctgctgacagg

SEQ ID NO: 14989 - DNA, 27 bp, Artificial Sequence
  Chr13_7 Reverse Primer
tcatatatttcatgtaaggtttctcaa

SEQ ID NO: 14990 - DNA, 20 bp, Artificial Sequence
  Chr13_7 Reverse Primer
ttgatgagattccgcaaaca

SEQ ID NO: 14991 - DNA, 20 bp, Artificial Sequence
  Chr13_7 Reverse Primer
aagttttgataccggcaaaa

SEQ ID NO: 14992 - DNA, 20 bp, Artificial Sequence
  Chr13_7 Reverse Primer
attgcaacaaggcaactggt

SEQ ID NO: 14993 - DNA, 20 bp, Artificial Sequence
  Chr13_8 Forward Primer
attcacccacatggtccttc

SEQ ID NO: 14994 - DNA, 20 bp, Artificial Sequence
  Chr13_8 Forward Primer
taaagcgcctccagaacaaa

SEQ ID NO: 14995 - DNA, 20 bp, Artificial Sequence
  Chr13_8 Forward Primer
aggctcgtcgttgcaatatc

SEQ ID NO: 14996 - DNA, 20 bp, Artificial Sequence
  Chr13_8 Forward Primer
ttgggcttttaaatcctgct

SEQ ID NO: 14997 - DNA, 27 bp, Artificial Sequence
  Chr13_8 Forward Primer
ttctgattttcttgaacttttcttaaa

SEQ ID NO: 14998 - DNA, 21 bp, Artificial Sequence
  Chr13_8 Forward Primer
tttgctaagtggaagccagaa

SEQ ID NO: 14999 - DNA, 20 bp, Artificial Sequence
  Chr13_8 Forward Primer
ccccattagggattatgctg

SEQ ID NO: 15000 - DNA, 19 bp, Artificial Sequence
  Chr13_8 Forward Primer
tgggctttaaagtgcaggg

SEQ ID NO: 15001 - DNA, 20 bp, Artificial Sequence
  Chr13_8 Forward Primer
ggcctgctatttccttcaaa

SEQ ID NO: 15002 - DNA, 20 bp, Artificial Sequence
  Chr13_8 Forward Primer
agttttgcaggtttgcatcc

SEQ ID NO: 15003 - DNA, 22 bp, Artificial Sequence
  Chr13_8 Forward Primer
ctgaagatttcgacttccactg

SEQ ID NO: 15004 - DNA, 20 bp, Artificial Sequence
  Chr13_8 Forward Primer
gagagaatgccgctctgttt

SEQ ID NO: 15005 - DNA, 20 bp, Artificial Sequence
  Chr13_8 Forward Primer
tcttcccaaatgccaagagt

SEQ ID NO: 15006 - DNA, 20 bp, Artificial Sequence
  Chr13_8 Forward Primer
accaagtggtaaaattgggc

SEQ ID NO: 15007 - DNA, 22 bp, Artificial Sequence
  Chr13_8 Forward Primer
gaacttagccttggattcctga

SEQ ID NO: 15008 - DNA, 20 bp, Artificial Sequence
  Chr13_8 Forward Primer
gtgataggaagcctgctgga

SEQ ID NO: 15009 - DNA, 23 bp, Artificial Sequence
  Chr13_8 Forward Primer
ttgaaattcagatgagtgagcaa

SEQ ID NO: 15010 - DNA, 27 bp, Artificial Sequence
  Chr13_8 Forward Primer
ttctttagcttagtggttgtatgagtt

SEQ ID NO: 15011 - DNA, 20 bp, Artificial Sequence
  Chr13_8 Forward Primer
cagtttggtctggctgtttg

SEQ ID NO: 15012 - DNA, 27 bp, Artificial Sequence
  Chr13_8 Forward Primer
tttaatcttcattacctgtgaaatatg

SEQ ID NO: 15013 - DNA, 23 bp, Artificial Sequence
  Chr13_8 Forward Primer
aaggtgggagttcttttgttttt

SEQ ID NO: 15014 - DNA, 20 bp, Artificial Sequence
  Chr13_8 Forward Primer
gtggtgcagtgtttgcatgt

SEQ ID NO: 15015 - DNA, 20 bp, Artificial Sequence
  Chr13_8 Forward Primer
tgccgacataaatgcgttag

SEQ ID NO: 15016 - DNA, 20 bp, Artificial Sequence
  Chr13_8 Forward Primer
cacactgttcagcaggttgg

SEQ ID NO: 15017 - DNA, 20 bp, Artificial Sequence
  Chr13_8 Forward Primer
tgacaaaatatgtgccccaa

SEQ ID NO: 15018 - DNA, 26 bp, Artificial Sequence
  Chr13_8 Forward Primer
tgtctttagacataggttatcgtcag

SEQ ID NO: 15019 - DNA, 22 bp, Artificial Sequence
  Chr13_8 Forward Primer
tgcccttgactgtacttacgaa

SEQ ID NO: 15020 - DNA, 20 bp, Artificial Sequence
  Chr13_8 Forward Primer
tgtcagactggctctccctt

SEQ ID NO: 15021 - DNA, 20 bp, Artificial Sequence
  Chr13_8 Forward Primer
cccgtgggtgaatgttactt

SEQ ID NO: 15022 - DNA, 20 bp, Artificial Sequence
  Chr13_8 Forward Primer
gttttcatgatgttgcgtgg

SEQ ID NO: 15023 - DNA, 20 bp, Artificial Sequence
  Chr13_8 Forward Primer
gacggagaattctgggttca

SEQ ID NO: 15024 - DNA, 20 bp, Artificial Sequence
  Chr13_8 Forward Primer
aacatttgggggcacataga

SEQ ID NO: 15025 - DNA, 22 bp, Artificial Sequence
  Chr13_8 Forward Primer
tttcacatttgcaggttctagg

SEQ ID NO: 15026 - DNA, 22 bp, Artificial Sequence
  Chr13_8 Forward Primer
ggggaaaccacaaaataagtga

SEQ ID NO: 15027 - DNA, 20 bp, Artificial Sequence
  Chr13_8 Forward Primer
aacagcccacaaagcaaaag

SEQ ID NO: 15028 - DNA, 20 bp, Artificial Sequence
  Chr13_8 Forward Primer
ccccaaaatgactgcaaagt

SEQ ID NO: 15029 - DNA, 20 bp, Artificial Sequence
  Chr13_8 Forward Primer
tgggatagtggttctggtca

SEQ ID NO: 15030 - DNA, 20 bp, Artificial Sequence
  Chr13_8 Forward Primer
tcagagggggaaataactgc

SEQ ID NO: 15031 - DNA, 23 bp, Artificial Sequence
  Chr13_8 Forward Primer
gccttcttaaaatgatgatggaa

SEQ ID NO: 15032 - DNA, 19 bp, Artificial Sequence
  Chr13_8 Forward Primer
ttgcagcaattaagcaggc

SEQ ID NO: 15033 - DNA, 21 bp, Artificial Sequence
  Chr13_8 Forward Primer
ggaccaagtttgaggaaatca

SEQ ID NO: 15034 - DNA, 20 bp, Artificial Sequence
  Chr13_8 Forward Primer
aatgcatgtttgcttgcttc

SEQ ID NO: 15035 - DNA, 20 bp, Artificial Sequence
  Chr13_8 Forward Primer
acagttgctcaaggccaagt

SEQ ID NO: 15036 - DNA, 20 bp, Artificial Sequence
  Chr13_8 Forward Primer
ttgcttggcttttggatttc

SEQ ID NO: 15037 - DNA, 23 bp, Artificial Sequence
  Chr13_8 Forward Primer
caggagattagagacagaaggca

SEQ ID NO: 15038 - DNA, 20 bp, Artificial Sequence
  Chr13_8 Forward Primer
gcctcctctgaatcactgct

SEQ ID NO: 15039 - DNA, 22 bp, Artificial Sequence
  Chr13_8 Forward Primer
tttggctctagcacaagttctc

SEQ ID NO: 15040 - DNA, 20 bp, Artificial Sequence
  Chr13_8 Forward Primer
tgcaaaaaggtctgttgcag

SEQ ID NO: 15041 - DNA, 21 bp, Artificial Sequence
  Chr13_8 Forward Primer
tgagccaattcaaatgatgtt

SEQ ID NO: 15042 - DNA, 24 bp, Artificial Sequence
  Chr13_8 Forward Primer
tgctcaataaaacaaaaagactgc

SEQ ID NO: 15043 - DNA, 23 bp, Artificial Sequence
  Chr13_8 Forward Primer
tggaatttacttttggtcttgga

SEQ ID NO: 15044 - DNA, 20 bp, Artificial Sequence
  Chr13_8 Forward Primer
gcagatacagagtgcgttgg

SEQ ID NO: 15045 - DNA, 20 bp, Artificial Sequence
  Chr13_8 Forward Primer
cagggtgaaaggaaccttga

SEQ ID NO: 15046 - DNA, 20 bp, Artificial Sequence
  Chr13_8 Forward Primer
ccacactttggattgcacac

SEQ ID NO: 15047 - DNA, 20 bp, Artificial Sequence
  Chr13_8 Forward Primer
gagttcccttcgagttgtgg

SEQ ID NO: 15048 - DNA, 20 bp, Artificial Sequence
  Chr13_8 Forward Primer
acttggcctgcagttgctat

SEQ ID NO: 15049 - DNA, 20 bp, Artificial Sequence
  Chr13_8 Forward Primer
tgggtcacagggagtaatgg

SEQ ID NO: 15050 - DNA, 20 bp, Artificial Sequence
  Chr13_8 Forward Primer
gctggaacttatctgggcct

SEQ ID NO: 15051 - DNA, 20 bp, Artificial Sequence
  Chr13_8 Forward Primer
aaggcaatcagcttgtctcc

SEQ ID NO: 15052 - DNA, 20 bp, Artificial Sequence
  Chr13_8 Forward Primer
atgtggcaggtttgacagtg

SEQ ID NO: 15053 - DNA, 20 bp, Artificial Sequence
  Chr13_8 Forward Primer
gggcattccattctcaccta

SEQ ID NO: 15054 - DNA, 20 bp, Artificial Sequence
  Chr13_8 Forward Primer
gcactgcagaaatggaggtt

SEQ ID NO: 15055 - DNA, 21 bp, Artificial Sequence
  Chr13_8 Forward Primer
tcctcaggcaggttcatagtg

SEQ ID NO: 15056 - DNA, 20 bp, Artificial Sequence
  Chr13_8 Forward Primer
gggtggggcacagtagataa

SEQ ID NO: 15057 - DNA, 20 bp, Artificial Sequence
  Chr13_8 Forward Primer
aaggccaaaggcagagactt

SEQ ID NO: 15058 - DNA, 20 bp, Artificial Sequence
  Chr13_8 Forward Primer
ccttcctctggaccgatatg

SEQ ID NO: 15059 - DNA, 20 bp, Artificial Sequence
  Chr13_8 Forward Primer
cagggtgcgcctaaataaga

SEQ ID NO: 15060 - DNA, 25 bp, Artificial Sequence
  Chr13_8 Forward Primer
tgaacacagacaatttacacatcag

SEQ ID NO: 15061 - DNA, 22 bp, Artificial Sequence
  Chr13_8 Forward Primer
cacaagatgtggagaaatttgg

SEQ ID NO: 15062 - DNA, 25 bp, Artificial Sequence
  Chr13_8 Forward Primer
gaaaatagcatcatggctttacttg

SEQ ID NO: 15063 - DNA, 20 bp, Artificial Sequence
  Chr13_8 Forward Primer
tgccctactcagtccatcag

SEQ ID NO: 15064 - DNA, 21 bp, Artificial Sequence
  Chr13_8 Forward Primer
tttatgcccaacttttcagga

SEQ ID NO: 15065 - DNA, 20 bp, Artificial Sequence
  Chr13_8 Forward Primer
tgccagcttattccacaaaa

SEQ ID NO: 15066 - DNA, 20 bp, Artificial Sequence
  Chr13_8 Forward Primer
ccacaggagttgttcagggt

SEQ ID NO: 15067 - DNA, 20 bp, Artificial Sequence
  Chr13_8 Forward Primer
taacatcagggtgtcagcca

SEQ ID NO: 15068 - DNA, 20 bp, Artificial Sequence
  Chr13_8 Forward Primer
ctccaacttcccctgctatg

SEQ ID NO: 15069 - DNA, 20 bp, Artificial Sequence
  Chr13_8 Forward Primer
agatgcgtgtttctgagcct

SEQ ID NO: 15070 - DNA, 27 bp, Artificial Sequence
  Chr13_8 Forward Primer
aagtaacaggtttatttcaatgctaat

SEQ ID NO: 15071 - DNA, 21 bp, Artificial Sequence
  Chr13_8 Forward Primer
ggaggagctcactaaacaccc

SEQ ID NO: 15072 - DNA, 21 bp, Artificial Sequence
  Chr13_8 Forward Primer
tttaaaatgggagaagccaca

SEQ ID NO: 15073 - DNA, 20 bp, Artificial Sequence
  Chr13_8 Forward Primer
gggatggtatgtcaacccag

SEQ ID NO: 15074 - DNA, 20 bp, Artificial Sequence
  Chr13_8 Forward Primer
aagagcaaaaaggcaacgag

SEQ ID NO: 15075 - DNA, 20 bp, Artificial Sequence
  Chr13_8 Forward Primer
ggctgtagtggggtagaggg

SEQ ID NO: 15076 - DNA, 20 bp, Artificial Sequence
  Chr13_8 Forward Primer
ttaaggtggaaccaagccac

SEQ ID NO: 15077 - DNA, 23 bp, Artificial Sequence
  Chr13_8 Forward Primer
ccaaattgcacatttatgaacag

SEQ ID NO: 15078 - DNA, 20 bp, Artificial Sequence
  Chr13_8 Forward Primer
cctctggggaagtgtaagca

SEQ ID NO: 15079 - DNA, 21 bp, Artificial Sequence
  Chr13_8 Forward Primer
tgtttaagctttctgccctca

SEQ ID NO: 15080 - DNA, 20 bp, Artificial Sequence
  Chr13_8 Forward Primer
tttcctcccacttctcctca

SEQ ID NO: 15081 - DNA, 21 bp, Artificial Sequence
  Chr13_8 Forward Primer
tggcataagcatttgacacaa

SEQ ID NO: 15082 - DNA, 23 bp, Artificial Sequence
  Chr13_8 Forward Primer
gcaaatctccttgagataccaaa

SEQ ID NO: 15083 - DNA, 22 bp, Artificial Sequence
  Chr13_8 Forward Primer
caaatagcaaacttctgagggc

SEQ ID NO: 15084 - DNA, 20 bp, Artificial Sequence
  Chr13_8 Forward Primer
ggatggaggaagaaagggag

SEQ ID NO: 15085 - DNA, 20 bp, Artificial Sequence
  Chr13_8 Forward Primer
tggtggaaattacacaggca

SEQ ID NO: 15086 - DNA, 20 bp, Artificial Sequence
  Chr13_8 Forward Primer
tcacaggcctatcccctcta

SEQ ID NO: 15087 - DNA, 23 bp, Artificial Sequence
  Chr13_8 Forward Primer
ccatttgaaattgtattgatggg

SEQ ID NO: 15088 - DNA, 26 bp, Artificial Sequence
  Chr13_8 Forward Primer
gaaagtttctgaaggaagatttattt

SEQ ID NO: 15089 - DNA, 20 bp, Artificial Sequence
  Chr13_8 Reverse Primer
gctttactacgaccggaggc

SEQ ID NO: 15090 - DNA, 18 bp, Artificial Sequence
  Chr13_8 Reverse Primer
gggctaacaaagcccacg

SEQ ID NO: 15091 - DNA, 20 bp, Artificial Sequence
  Chr13_8 Reverse Primer
atcagcagcaatcaccgact

SEQ ID NO: 15092 - DNA, 22 bp, Artificial Sequence
  Chr13_8 Reverse Primer
ctcagaaaagctactggtgcag

SEQ ID NO: 15093 - DNA, 20 bp, Artificial Sequence
  Chr13_8 Reverse Primer
ctgcataagccagtttccaa

SEQ ID NO: 15094 - DNA, 20 bp, Artificial Sequence
  Chr13_8 Reverse Primer
aagtggtggctcttccaatg

SEQ ID NO: 15095 - DNA, 20 bp, Artificial Sequence
  Chr13_8 Reverse Primer
gctacaagtgccttcactgc

SEQ ID NO: 15096 - DNA, 22 bp, Artificial Sequence
  Chr13_8 Reverse Primer
tgcaaaactaacagaggactgc

SEQ ID NO: 15097 - DNA, 20 bp, Artificial Sequence
  Chr13_8 Reverse Primer
acaggacagtttgattgggc

SEQ ID NO: 15098 - DNA, 20 bp, Artificial Sequence
  Chr13_8 Reverse Primer
cttctggtcacaatccccac

SEQ ID NO: 15099 - DNA, 27 bp, Artificial Sequence
  Chr13_8 Reverse Primer
tttagtcatatcgcaatacttaacagc

SEQ ID NO: 15100 - DNA, 20 bp, Artificial Sequence
  Chr13_8 Reverse Primer
aagcagtctgaggaccttgg

SEQ ID NO: 15101 - DNA, 20 bp, Artificial Sequence
  Chr13_8 Reverse Primer
ggcagaaatgctgggtaaaa

SEQ ID NO: 15102 - DNA, 26 bp, Artificial Sequence
  Chr13_8 Reverse Primer
ggtgaaaacttttgttagacttcaga

SEQ ID NO: 15103 - DNA, 20 bp, Artificial Sequence
  Chr13_8 Reverse Primer
ttgaaagccacgtttgtcac

SEQ ID NO: 15104 - DNA, 20 bp, Artificial Sequence
  Chr13_8 Reverse Primer
accaaacccacaacaaaaca

SEQ ID NO: 15105 - DNA, 20 bp, Artificial Sequence
  Chr13_8 Reverse Primer
agttgtacatgcaaacgcca

SEQ ID NO: 15106 - DNA, 22 bp, Artificial Sequence
  Chr13_8 Reverse Primer
ggcacatctcaatgttctgtct

SEQ ID NO: 15107 - DNA, 20 bp, Artificial Sequence
  Chr13_8 Reverse Primer
tggtccttgtctccacttcc

SEQ ID NO: 15108 - DNA, 25 bp, Artificial Sequence
  Chr13_8 Reverse Primer
gaagaatgcttcagacttaccaaga

SEQ ID NO: 15109 - DNA, 20 bp, Artificial Sequence
  Chr13_8 Reverse Primer
ctttgagggctggtcagaac

SEQ ID NO: 15110 - DNA, 20 bp, Artificial Sequence
  Chr13_8 Reverse Primer
ctgcatccaaccacaaacag

SEQ ID NO: 15111 - DNA, 25 bp, Artificial Sequence
  Chr13_8 Reverse Primer
tgaacaattagtacatgctcacctc

SEQ ID NO: 15112 - DNA, 20 bp, Artificial Sequence
  Chr13_8 Reverse Primer
tcctgccccaaagactctaa

SEQ ID NO: 15113 - DNA, 20 bp, Artificial Sequence
  Chr13_8 Reverse Primer
ttgttcagaatgatggtggc

SEQ ID NO: 15114 - DNA, 23 bp, Artificial Sequence
  Chr13_8 Reverse Primer
cacaagacactcagaatatggca

SEQ ID NO: 15115 - DNA, 20 bp, Artificial Sequence
  Chr13_8 Reverse Primer
aggtatccggagtgggaagt

SEQ ID NO: 15116 - DNA, 20 bp, Artificial Sequence
  Chr13_8 Reverse Primer
aagcatccatgaaccacaca

SEQ ID NO: 15117 - DNA, 20 bp, Artificial Sequence
  Chr13_8 Reverse Primer
ccccacttctaggctttcct

SEQ ID NO: 15118 - DNA, 20 bp, Artificial Sequence
  Chr13_8 Reverse Primer
attgaggcaccacgattcag

SEQ ID NO: 15119 - DNA, 20 bp, Artificial Sequence
  Chr13_8 Reverse Primer
tgttcctcagaccgagttca

SEQ ID NO: 15120 - DNA, 20 bp, Artificial Sequence
  Chr13_8 Reverse Primer
actgaataggggagggcagt

SEQ ID NO: 15121 - DNA, 20 bp, Artificial Sequence
  Chr13_8 Reverse Primer
aaacattgagacagcccgag

SEQ ID NO: 15122 - DNA, 21 bp, Artificial Sequence
  Chr13_8 Reverse Primer
tctgctagtggttgctttgaa

SEQ ID NO: 15123 - DNA, 20 bp, Artificial Sequence
  Chr13_8 Reverse Primer
cagagtatcaagggccagga

SEQ ID NO: 15124 - DNA, 20 bp, Artificial Sequence
  Chr13_8 Reverse Primer
ctctccaccaaagcaagcat

SEQ ID NO: 15125 - DNA, 21 bp, Artificial Sequence
  Chr13_8 Reverse Primer
cccaaagagtgatttggtgaa

SEQ ID NO: 15126 - DNA, 20 bp, Artificial Sequence
  Chr13_8 Reverse Primer
tacattccattttggggtgg

SEQ ID NO: 15127 - DNA, 21 bp, Artificial Sequence
  Chr13_8 Reverse Primer
tgctaaatggattgttgtccc

SEQ ID NO: 15128 - DNA, 21 bp, Artificial Sequence
  Chr13_8 Reverse Primer
gacagaacagcgtcagtagca

SEQ ID NO: 15129 - DNA, 23 bp, Artificial Sequence
  Chr13_8 Reverse Primer
ttgttgtattccctgtgattgtg

SEQ ID NO: 15130 - DNA, 20 bp, Artificial Sequence
  Chr13_8 Reverse Primer
ttgcccctgagttttccata

SEQ ID NO: 15131 - DNA, 21 bp, Artificial Sequence
  Chr13_8 Reverse Primer
gggcatggattcatgagatta

SEQ ID NO: 15132 - DNA, 20 bp, Artificial Sequence
  Chr13_8 Reverse Primer
ggcaagggtaatggcttttt

SEQ ID NO: 15133 - DNA, 22 bp, Artificial Sequence
  Chr13_8 Reverse Primer
gggtttttcttagcagtatcca

SEQ ID NO: 15134 - DNA, 20 bp, Artificial Sequence
  Chr13_8 Reverse Primer
tggagggctgagtaaatcgt

SEQ ID NO: 15135 - DNA, 20 bp, Artificial Sequence
  Chr13_8 Reverse Primer
tgatcgtaacaggaatgcga

SEQ ID NO: 15136 - DNA, 25 bp, Artificial Sequence
  Chr13_8 Reverse Primer
cacttaacagtttccatgttttctg

SEQ ID NO: 15137 - DNA, 20 bp, Artificial Sequence
  Chr13_8 Reverse Primer
taactcacggtggggacaac

SEQ ID NO: 15138 - DNA, 21 bp, Artificial Sequence
  Chr13_8 Reverse Primer
catagtatgggaaggctgaca

SEQ ID NO: 15139 - DNA, 20 bp, Artificial Sequence
  Chr13_8 Reverse Primer
tggctgtttgaggcctattc

SEQ ID NO: 15140 - DNA, 20 bp, Artificial Sequence
  Chr13_8 Reverse Primer
atgaagaatgggagacgtgg

SEQ ID NO: 15141 - DNA, 20 bp, Artificial Sequence
  Chr13_8 Reverse Primer
tcattggatggaacaccaga

SEQ ID NO: 15142 - DNA, 20 bp, Artificial Sequence
  Chr13_8 Reverse Primer
gcagaaagtgcgctgtgtta

SEQ ID NO: 15143 - DNA, 20 bp, Artificial Sequence
  Chr13_8 Reverse Primer
caagcaagcaaccaagatca

SEQ ID NO: 15144 - DNA, 20 bp, Artificial Sequence
  Chr13_8 Reverse Primer
gctccttaatgctgggaaca

SEQ ID NO: 15145 - DNA, 20 bp, Artificial Sequence
  Chr13_8 Reverse Primer
gggatactccaacatgaggc

SEQ ID NO: 15146 - DNA, 20 bp, Artificial Sequence
  Chr13_8 Reverse Primer
cccacagtttcaccatgtca

SEQ ID NO: 15147 - DNA, 20 bp, Artificial Sequence
  Chr13_8 Reverse Primer
acagcagcacctcatttcag

SEQ ID NO: 15148 - DNA, 20 bp, Artificial Sequence
  Chr13_8 Reverse Primer
tttgcctgagggacaatgtt

SEQ ID NO: 15149 - DNA, 20 bp, Artificial Sequence
  Chr13_8 Reverse Primer
caaacaatgttcccccaaat

SEQ ID NO: 15150 - DNA, 20 bp, Artificial Sequence
  Chr13_8 Reverse Primer
tgctgctgattgccatactc

SEQ ID NO: 15151 - DNA, 21 bp, Artificial Sequence
  Chr13_8 Reverse Primer
ggctgagatagaactccaagg

SEQ ID NO: 15152 - DNA, 20 bp, Artificial Sequence
  Chr13_8 Reverse Primer
tctcaatgcaaaatggtgga

SEQ ID NO: 15153 - DNA, 20 bp, Artificial Sequence
  Chr13_8 Reverse Primer
cagggagcaagactgggata

SEQ ID NO: 15154 - DNA, 20 bp, Artificial Sequence
  Chr13_8 Reverse Primer
aggaggctcaagggaaagaa

SEQ ID NO: 15155 - DNA, 20 bp, Artificial Sequence
  Chr13_8 Reverse Primer
gaattttcccactccaccct

SEQ ID NO: 15156 - DNA, 24 bp, Artificial Sequence
  Chr13_8 Reverse Primer
tcactgcttttgtatgcatatttt

SEQ ID NO: 15157 - DNA, 22 bp, Artificial Sequence
  Chr13_8 Reverse Primer
tttttccttaatttgattccca

SEQ ID NO: 15158 - DNA, 20 bp, Artificial Sequence
  Chr13_8 Reverse Primer
tgcaatgccatctcaatcat

SEQ ID NO: 15159 - DNA, 20 bp, Artificial Sequence
  Chr13_8 Reverse Primer
agcccttaccatttgccttt

SEQ ID NO: 15160 - DNA, 22 bp, Artificial Sequence
  Chr13_8 Reverse Primer
ccaacaaatggatttgaatttt

SEQ ID NO: 15161 - DNA, 20 bp, Artificial Sequence
  Chr13_8 Reverse Primer
tttgatctgggcaaaactcc

SEQ ID NO: 15162 - DNA, 20 bp, Artificial Sequence
  Chr13_8 Reverse Primer
tctgacccacagaactgagc

SEQ ID NO: 15163 - DNA, 20 bp, Artificial Sequence
  Chr13_8 Reverse Primer
tagttgctgagacggaaggg

SEQ ID NO: 15164 - DNA, 20 bp, Artificial Sequence
  Chr13_8 Reverse Primer
gatgtcccccagtattccct

SEQ ID NO: 15165 - DNA, 21 bp, Artificial Sequence
  Chr13_8 Reverse Primer
cagcaggcctgttattaggaa

SEQ ID NO: 15166 - DNA, 24 bp, Artificial Sequence
  Chr13_8 Reverse Primer
agcttttggctcagagttagttac

SEQ ID NO: 15167 - DNA, 20 bp, Artificial Sequence
  Chr13_8 Reverse Primer
gggacatgaccctgctctta

SEQ ID NO: 15168 - DNA, 21 bp, Artificial Sequence
  Chr13_8 Reverse Primer
taagtccatggttaaatgccc

SEQ ID NO: 15169 - DNA, 20 bp, Artificial Sequence
  Chr13_8 Reverse Primer
ccttttgttggaagcaagga

SEQ ID NO: 15170 - DNA, 23 bp, Artificial Sequence
  Chr13_8 Reverse Primer
tctccatctttgacagctctctt

SEQ ID NO: 15171 - DNA, 20 bp, Artificial Sequence
  Chr13_8 Reverse Primer
gcagtgatgaagacaggcaa

SEQ ID NO: 15172 - DNA, 20 bp, Artificial Sequence
  Chr13_8 Reverse Primer
cttggtggggacacgttatc

SEQ ID NO: 15173 - DNA, 25 bp, Artificial Sequence
  Chr13_8 Reverse Primer
tcaaatccagctactctgtaaaact

SEQ ID NO: 15174 - DNA, 20 bp, Artificial Sequence
  Chr13_8 Reverse Primer
gcatgaacatgaagttggga

SEQ ID NO: 15175 - DNA, 20 bp, Artificial Sequence
  Chr13_8 Reverse Primer
tgctgaggtttcttggctct

SEQ ID NO: 15176 - DNA, 19 bp, Artificial Sequence
  Chr13_8 Reverse Primer
caggcccatgatttttgtg

SEQ ID NO: 15177 - DNA, 20 bp, Artificial Sequence
  Chr13_8 Reverse Primer
agtgcagtctgctcctggtt

SEQ ID NO: 15178 - DNA, 26 bp, Artificial Sequence
  Chr13_8 Reverse Primer
tggaggaatcaatattctagagacaa

SEQ ID NO: 15179 - DNA, 23 bp, Artificial Sequence
  Chr13_8 Reverse Primer
attaagttgcaggaaagacaacg

SEQ ID NO: 15180 - DNA, 20 bp, Artificial Sequence
  Chr13_8 Reverse Primer
cgctccacatcagaaaaatg

SEQ ID NO: 15181 - DNA, 21 bp, Artificial Sequence
  Chr13_8 Reverse Primer
cattccaagaaatgggaacaa

SEQ ID NO: 15182 - DNA, 20 bp, Artificial Sequence
  Chr13_8 Reverse Primer
cccaggcttcttgtgtcata

SEQ ID NO: 15183 - DNA, 21 bp, Artificial Sequence
  Chr13_8 Reverse Primer
aactggatgccatctcaaaga

SEQ ID NO: 15184 - DNA, 22 bp, Artificial Sequence
  Chr13_8 Reverse Primer
gcatgaaaacgtatgcaatctt

SEQ ID NO: 15185 - DNA, 20 bp, Artificial Sequence
  Chr13_9 Forward Primer
accagtgtcctcggtgaatc

SEQ ID NO: 15186 - DNA, 20 bp, Artificial Sequence
  Chr13_9 Forward Primer
cagtgtgaaactggcacagg

SEQ ID NO: 15187 - DNA, 20 bp, Artificial Sequence
  Chr13_9 Forward Primer
gagccagccttagcattgac

SEQ ID NO: 15188 - DNA, 20 bp, Artificial Sequence
  Chr13_9 Forward Primer
ttcactgctttgaggggagt

SEQ ID NO: 15189 - DNA, 21 bp, Artificial Sequence
  Chr13_9 Forward Primer
catgccaatattaggttccca

SEQ ID NO: 15190 - DNA, 20 bp, Artificial Sequence
  Chr13_9 Forward Primer
cctggcattccagtctcttc

SEQ ID NO: 15191 - DNA, 20 bp, Artificial Sequence
  Chr13_9 Forward Primer
atggcatataggaggggctc

SEQ ID NO: 15192 - DNA, 20 bp, Artificial Sequence
  Chr13_9 Forward Primer
tgatatcagaggatgctgcg

SEQ ID NO: 15193 - DNA, 20 bp, Artificial Sequence
  Chr13_9 Forward Primer
aaccctgaagccagtgaaga

SEQ ID NO: 15194 - DNA, 20 bp, Artificial Sequence
  Chr13_9 Forward Primer
aggggcagagtttctggttc

SEQ ID NO: 15195 - DNA, 22 bp, Artificial Sequence
  Chr13_9 Forward Primer
ggttctgatgacttttctgcaa

SEQ ID NO: 15196 - DNA, 20 bp, Artificial Sequence
  Chr13_9 Forward Primer
ctccttctccccgttaccat

SEQ ID NO: 15197 - DNA, 22 bp, Artificial Sequence
  Chr13_9 Forward Primer
aaatgcagttccttcttttgaa

SEQ ID NO: 15198 - DNA, 20 bp, Artificial Sequence
  Chr13_9 Forward Primer
agctggaacagaagctggag

SEQ ID NO: 15199 - DNA, 20 bp, Artificial Sequence
  Chr13_9 Forward Primer
tcctttctcttggctctcaa

SEQ ID NO: 15200 - DNA, 20 bp, Artificial Sequence
  Chr13_9 Forward Primer
aatccatgggttaatgggtg

SEQ ID NO: 15201 - DNA, 20 bp, Artificial Sequence
  Chr13_9 Forward Primer
gtgttttgtggggctttgat

SEQ ID NO: 15202 - DNA, 20 bp, Artificial Sequence
  Chr13_9 Forward Primer
attccacatgcctgatgaca

SEQ ID NO: 15203 - DNA, 20 bp, Artificial Sequence
  Chr13_9 Forward Primer
ctgcagcactgaagttttgg

SEQ ID NO: 15204 - DNA, 23 bp, Artificial Sequence
  Chr13_9 Forward Primer
tcagtgacaataagctctttcca

SEQ ID NO: 15205 - DNA, 20 bp, Artificial Sequence
  Chr13_9 Forward Primer
gccagaaccactgtattcgc

SEQ ID NO: 15206 - DNA, 20 bp, Artificial Sequence
  Chr13_9 Forward Primer
ctgatcagcaagagcatgga

SEQ ID NO: 15207 - DNA, 20 bp, Artificial Sequence
  Chr13_9 Forward Primer
ccacagacagacacacggtc

SEQ ID NO: 15208 - DNA, 24 bp, Artificial Sequence
  Chr13_9 Forward Primer
caaagaggtaactagcaaaaggga

SEQ ID NO: 15209 - DNA, 20 bp, Artificial Sequence
  Chr13_9 Forward Primer
ttcccaccagcttcaaattc

SEQ ID NO: 15210 - DNA, 20 bp, Artificial Sequence
  Chr13_9 Forward Primer
cacagccctgggcatatagt

SEQ ID NO: 15211 - DNA, 20 bp, Artificial Sequence
  Chr13_9 Forward Primer
taatggggcacagtgaatga

SEQ ID NO: 15212 - DNA, 20 bp, Artificial Sequence
  Chr13_9 Forward Primer
gcttcctgccatatcctgaa

SEQ ID NO: 15213 - DNA, 21 bp, Artificial Sequence
  Chr13_9 Forward Primer
gagaagctagaattgtggccc

SEQ ID NO: 15214 - DNA, 20 bp, Artificial Sequence
  Chr13_9 Forward Primer
acagtccgtatgccatcctc

SEQ ID NO: 15215 - DNA, 20 bp, Artificial Sequence
  Chr13_9 Forward Primer
agctctcggtccttactccc

SEQ ID NO: 15216 - DNA, 20 bp, Artificial Sequence
  Chr13_9 Forward Primer
gtgtctggttctgtgttggg

SEQ ID NO: 15217 - DNA, 20 bp, Artificial Sequence
  Chr13_9 Forward Primer
tcccttgcagatgtgaacaa

SEQ ID NO: 15218 - DNA, 23 bp, Artificial Sequence
  Chr13_9 Forward Primer
ttcaagtaatttttgttcaaggc

SEQ ID NO: 15219 - DNA, 20 bp, Artificial Sequence
  Chr13_9 Forward Primer
aacccctccctcatgtcttt

SEQ ID NO: 15220 - DNA, 20 bp, Artificial Sequence
  Chr13_9 Forward Primer
gcttcccctgtccctttagt

SEQ ID NO: 15221 - DNA, 20 bp, Artificial Sequence
  Chr13_9 Forward Primer
gaggacattcctgccttctg

SEQ ID NO: 15222 - DNA, 20 bp, Artificial Sequence
  Chr13_9 Forward Primer
catttttgatcattgcctgc

SEQ ID NO: 15223 - DNA, 23 bp, Artificial Sequence
  Chr13_9 Forward Primer
tctgtgtgaatcctttcttctca

SEQ ID NO: 15224 - DNA, 20 bp, Artificial Sequence
  Chr13_9 Forward Primer
cagttgcatttttcctgcac

SEQ ID NO: 15225 - DNA, 23 bp, Artificial Sequence
  Chr13_9 Forward Primer
tttcaggacaaaagcaaattaaa

SEQ ID NO: 15226 - DNA, 20 bp, Artificial Sequence
  Chr13_9 Forward Primer
gatgggtggttcaccttttg

SEQ ID NO: 15227 - DNA, 21 bp, Artificial Sequence
  Chr13_9 Forward Primer
ggctagacttattctgccagc

SEQ ID NO: 15228 - DNA, 20 bp, Artificial Sequence
  Chr13_9 Forward Primer
ttacccagcaaggaaaccac

SEQ ID NO: 15229 - DNA, 20 bp, Artificial Sequence
  Chr13_9 Forward Primer
ctgaagtggctcatggttga

SEQ ID NO: 15230 - DNA, 20 bp, Artificial Sequence
  Chr13_9 Forward Primer
ccctgtgtcccatcctaagt

SEQ ID NO: 15231 - DNA, 20 bp, Artificial Sequence
  Chr13_9 Forward Primer
ccagtaagaatgccagaggc

SEQ ID NO: 15232 - DNA, 20 bp, Artificial Sequence
  Chr13_9 Forward Primer
tccaccagccagatgtcata

SEQ ID NO: 15233 - DNA, 20 bp, Artificial Sequence
  Chr13_9 Forward Primer
cagactccaggaatgggaaa

SEQ ID NO: 15234 - DNA, 20 bp, Artificial Sequence
  Chr13_9 Forward Primer
ttgtgtggaggggttagtcc

SEQ ID NO: 15235 - DNA, 21 bp, Artificial Sequence
  Chr13_9 Forward Primer
cagggagtattcaagtctggc

SEQ ID NO: 15236 - DNA, 20 bp, Artificial Sequence
  Chr13_9 Forward Primer
tatttccaggagggctgtca

SEQ ID NO: 15237 - DNA, 24 bp, Artificial Sequence
  Chr13_9 Forward Primer
catcaaaatgctattatccatcca

SEQ ID NO: 15238 - DNA, 20 bp, Artificial Sequence
  Chr13_9 Forward Primer
tcttgcctgtgttttagggg

SEQ ID NO: 15239 - DNA, 20 bp, Artificial Sequence
  Chr13_9 Forward Primer
accatctctcaagcctccct

SEQ ID NO: 15240 - DNA, 20 bp, Artificial Sequence
  Chr13_9 Forward Primer
actccgcctggaggatttag

SEQ ID NO: 15241 - DNA, 20 bp, Artificial Sequence
  Chr13_9 Forward Primer
gttcccttcctcttcctgct

SEQ ID NO: 15242 - DNA, 19 bp, Artificial Sequence
  Chr13_9 Forward Primer
gccctgggatgacagtaca

SEQ ID NO: 15243 - DNA, 20 bp, Artificial Sequence
  Chr13_9 Forward Primer
aggacaaaagaccaggaggc

SEQ ID NO: 15244 - DNA, 20 bp, Artificial Sequence
  Chr13_9 Forward Primer
cacatgcagcaaggtattgg

SEQ ID NO: 15245 - DNA, 20 bp, Artificial Sequence
  Chr13_9 Forward Primer
tggagatgaggggtttgaag

SEQ ID NO: 15246 - DNA, 20 bp, Artificial Sequence
  Chr13_9 Forward Primer
cagaagttccatgagggcag

SEQ ID NO: 15247 - DNA, 20 bp, Artificial Sequence
  Chr13_9 Forward Primer
atgtgaggcaagaaagcacc

SEQ ID NO: 15248 - DNA, 21 bp, Artificial Sequence
  Chr13_9 Forward Primer
cgatcaattcaccaaaagttg

SEQ ID NO: 15249 - DNA, 23 bp, Artificial Sequence
  Chr13_9 Forward Primer
agcttagagggtgtgttttctga

SEQ ID NO: 15250 - DNA, 27 bp, Artificial Sequence
  Chr13_9 Forward Primer
tgatgttttcaatatttcaactctttg

SEQ ID NO: 15251 - DNA, 20 bp, Artificial Sequence
  Chr13_9 Forward Primer
aataccattggacccggttt

SEQ ID NO: 15252 - DNA, 23 bp, Artificial Sequence
  Chr13_9 Forward Primer
gaaatgacttcccatagtccctt

SEQ ID NO: 15253 - DNA, 20 bp, Artificial Sequence
  Chr13_9 Forward Primer
gatgagaatgcagccagaca

SEQ ID NO: 15254 - DNA, 20 bp, Artificial Sequence
  Chr13_9 Forward Primer
ccaaaatgtgcaatttcctt

SEQ ID NO: 15255 - DNA, 20 bp, Artificial Sequence
  Chr13_9 Forward Primer
ccactcaccatccaggaaat

SEQ ID NO: 15256 - DNA, 21 bp, Artificial Sequence
  Chr13_9 Forward Primer
ggactgtgggattgtcattca

SEQ ID NO: 15257 - DNA, 20 bp, Artificial Sequence
  Chr13_9 Forward Primer
gcctcattctttgaagctgg

SEQ ID NO: 15258 - DNA, 20 bp, Artificial Sequence
  Chr13_9 Forward Primer
gaaaaagtgttgcccccata

SEQ ID NO: 15259 - DNA, 24 bp, Artificial Sequence
  Chr13_9 Forward Primer
gaaaattattacatggtgccaaaa

SEQ ID NO: 15260 - DNA, 20 bp, Artificial Sequence
  Chr13_9 Forward Primer
accattgaccccatgaaatc

SEQ ID NO: 15261 - DNA, 24 bp, Artificial Sequence
  Chr13_9 Forward Primer
tgccctaaatttaatatcttttgc

SEQ ID NO: 15262 - DNA, 20 bp, Artificial Sequence
  Chr13_9 Forward Primer
tttggttgcttgatggaaga

SEQ ID NO: 15263 - DNA, 24 bp, Artificial Sequence
  Chr13_9 Forward Primer
tggttaggaatcagttttaggagc

SEQ ID NO: 15264 - DNA, 20 bp, Artificial Sequence
  Chr13_9 Forward Primer
ccttgaacctgaaatgacca

SEQ ID NO: 15265 - DNA, 21 bp, Artificial Sequence
  Chr13_9 Forward Primer
tggttttgtctttgttttggg

SEQ ID NO: 15266 - DNA, 20 bp, Artificial Sequence
  Chr13_9 Forward Primer
atgctgggatacctctcagg

SEQ ID NO: 15267 - DNA, 22 bp, Artificial Sequence
  Chr13_9 Forward Primer
cagattgatcttctctgcgatg

SEQ ID NO: 15268 - DNA, 20 bp, Artificial Sequence
  Chr13_9 Forward Primer
tgcaatgttgtgttgcagaa

SEQ ID NO: 15269 - DNA, 20 bp, Artificial Sequence
  Chr13_9 Forward Primer
atcctcctctgtcccatcct

SEQ ID NO: 15270 - DNA, 20 bp, Artificial Sequence
  Chr13_9 Forward Primer
gttcaccaggcatttgcatt

SEQ ID NO: 15271 - DNA, 20 bp, Artificial Sequence
  Chr13_9 Forward Primer
ggcagagaatgaactttggc

SEQ ID NO: 15272 - DNA, 21 bp, Artificial Sequence
  Chr13_9 Forward Primer
tgggttgagaagcactcaaag

SEQ ID NO: 15273 - DNA, 20 bp, Artificial Sequence
  Chr13_9 Forward Primer
gctacttacctgtgccagcc

SEQ ID NO: 15274 - DNA, 24 bp, Artificial Sequence
  Chr13_9 Forward Primer
tcattaaactgagactcctggtca

SEQ ID NO: 15275 - DNA, 21 bp, Artificial Sequence
  Chr13_9 Forward Primer
ttcatctctgttttcccaagg

SEQ ID NO: 15276 - DNA, 20 bp, Artificial Sequence
  Chr13_9 Forward Primer
cttagacagggatcccccag

SEQ ID NO: 15277 - DNA, 20 bp, Artificial Sequence
  Chr13_9 Forward Primer
cagatacatgcacacccaca

SEQ ID NO: 15278 - DNA, 22 bp, Artificial Sequence
  Chr13_9 Forward Primer
tccccatttctacatcagtgtc

SEQ ID NO: 15279 - DNA, 21 bp, Artificial Sequence
  Chr13_9 Forward Primer
cgatcaaaactccagatgaaa

SEQ ID NO: 15280 - DNA, 20 bp, Artificial Sequence
  Chr13_9 Forward Primer
tccatctttcactgttgcca

SEQ ID NO: 15281 - DNA, 20 bp, Artificial Sequence
  Chr13_9 Reverse Primer
tgtcttcggagcatcatttg

SEQ ID NO: 15282 - DNA, 20 bp, Artificial Sequence
  Chr13_9 Reverse Primer
gggctgtgaaatccaaacat

SEQ ID NO: 15283 - DNA, 20 bp, Artificial Sequence
  Chr13_9 Reverse Primer
gtgccatgcagtcttctctg

SEQ ID NO: 15284 - DNA, 20 bp, Artificial Sequence
  Chr13_9 Reverse Primer
acaatgcctgagcacacagt

SEQ ID NO: 15285 - DNA, 20 bp, Artificial Sequence
  Chr13_9 Reverse Primer
ggcaaaataaccacacctcc

SEQ ID NO: 15286 - DNA, 20 bp, Artificial Sequence
  Chr13_9 Reverse Primer
ttaatgggtgtgctgaggtg

SEQ ID NO: 15287 - DNA, 23 bp, Artificial Sequence
  Chr13_9 Reverse Primer
ttcagaatggatcttaccaaatg

SEQ ID NO: 15288 - DNA, 20 bp, Artificial Sequence
  Chr13_9 Reverse Primer
aatgctcccatcactgcaac

SEQ ID NO: 15289 - DNA, 20 bp, Artificial Sequence
  Chr13_9 Reverse Primer
tcttctctgtgcccatttcc

SEQ ID NO: 15290 - DNA, 20 bp, Artificial Sequence
  Chr13_9 Reverse Primer
gtggtccaccaaaaaccaag

SEQ ID NO: 15291 - DNA, 20 bp, Artificial Sequence
  Chr13_9 Reverse Primer
ctagaactgggccctgacaa

SEQ ID NO: 15292 - DNA, 20 bp, Artificial Sequence
  Chr13_9 Reverse Primer
tacaatttgggaggccacag

SEQ ID NO: 15293 - DNA, 23 bp, Artificial Sequence
  Chr13_9 Reverse Primer
caaaaaggtcctaaaaactgcaa

SEQ ID NO: 15294 - DNA, 20 bp, Artificial Sequence
  Chr13_9 Reverse Primer
aacagctgaggctggtgaat

SEQ ID NO: 15295 - DNA, 23 bp, Artificial Sequence
  Chr13_9 Reverse Primer
cccagaaaagttctgtgtaaagg

SEQ ID NO: 15296 - DNA, 20 bp, Artificial Sequence
  Chr13_9 Reverse Primer
agcaagagctccaattctgc

SEQ ID NO: 15297 - DNA, 20 bp, Artificial Sequence
  Chr13_9 Reverse Primer
gggaggacagatgtggaaaa

SEQ ID NO: 15298 - DNA, 22 bp, Artificial Sequence
  Chr13_9 Reverse Primer
aacatactttgcacaaagccaa

SEQ ID NO: 15299 - DNA, 22 bp, Artificial Sequence
  Chr13_9 Reverse Primer
tgagaaagtgcgtatgaagcat

SEQ ID NO: 15300 - DNA, 22 bp, Artificial Sequence
  Chr13_9 Reverse Primer
tcgattgttcatcatatttcca

SEQ ID NO: 15301 - DNA, 20 bp, Artificial Sequence
  Chr13_9 Reverse Primer
acgcattcctattctttggc

SEQ ID NO: 15302 - DNA, 20 bp, Artificial Sequence
  Chr13_9 Reverse Primer
cagctcagatcccaccattt

SEQ ID NO: 15303 - DNA, 20 bp, Artificial Sequence
  Chr13_9 Reverse Primer
ggggacccagaagattccta

SEQ ID NO: 15304 - DNA, 22 bp, Artificial Sequence
  Chr13_9 Reverse Primer
cacaaatgggaaaggttactcc

SEQ ID NO: 15305 - DNA, 22 bp, Artificial Sequence
  Chr13_9 Reverse Primer
ttggattggagtgtgaaattct

SEQ ID NO: 15306 - DNA, 20 bp, Artificial Sequence
  Chr13_9 Reverse Primer
tgcaagcacaagcacaatta

SEQ ID NO: 15307 - DNA, 20 bp, Artificial Sequence
  Chr13_9 Reverse Primer
tgtggatttgtgattaccgc

SEQ ID NO: 15308 - DNA, 20 bp, Artificial Sequence
  Chr13_9 Reverse Primer
cctctcacactgtgggcttt

SEQ ID NO: 15309 - DNA, 22 bp, Artificial Sequence
  Chr13_9 Reverse Primer
caacctacaattgagggattca

SEQ ID NO: 15310 - DNA, 20 bp, Artificial Sequence
  Chr13_9 Reverse Primer
gcacctttgctcaggaactc

SEQ ID NO: 15311 - DNA, 20 bp, Artificial Sequence
  Chr13_9 Reverse Primer
agaatgttgtagtggcccga

SEQ ID NO: 15312 - DNA, 21 bp, Artificial Sequence
  Chr13_9 Reverse Primer
tttgaagtggagacaactccc

SEQ ID NO: 15313 - DNA, 20 bp, Artificial Sequence
  Chr13_9 Reverse Primer
ccccttaccatctgtcttgg

SEQ ID NO: 15314 - DNA, 20 bp, Artificial Sequence
  Chr13_9 Reverse Primer
gccgttcatgctattaggct

SEQ ID NO: 15315 - DNA, 20 bp, Artificial Sequence
  Chr13_9 Reverse Primer
gtcaaagtcgggagaaacga

SEQ ID NO: 15316 - DNA, 20 bp, Artificial Sequence
  Chr13_9 Reverse Primer
catctaagccctgagccatc

SEQ ID NO: 15317 - DNA, 20 bp, Artificial Sequence
  Chr13_9 Reverse Primer
ccacagaaaatgcaagggtc

SEQ ID NO: 15318 - DNA, 20 bp, Artificial Sequence
  Chr13_9 Reverse Primer
gcaatgctttaattgcatcc

SEQ ID NO: 15319 - DNA, 20 bp, Artificial Sequence
  Chr13_9 Reverse Primer
ccaatatcagagaaggggca

SEQ ID NO: 15320 - DNA, 20 bp, Artificial Sequence
  Chr13_9 Reverse Primer
accctcagactggatgttgc

SEQ ID NO: 15321 - DNA, 21 bp, Artificial Sequence
  Chr13_9 Reverse Primer
ttgtgaagcagaggagacaca

SEQ ID NO: 15322 - DNA, 20 bp, Artificial Sequence
  Chr13_9 Reverse Primer
gcaaggattctgcagaggag

SEQ ID NO: 15323 - DNA, 27 bp, Artificial Sequence
  Chr13_9 Reverse Primer
tttacgacattgtatttttgtttactg

SEQ ID NO: 15324 - DNA, 20 bp, Artificial Sequence
  Chr13_9 Reverse Primer
accttggagatgtgctgacc

SEQ ID NO: 15325 - DNA, 20 bp, Artificial Sequence
  Chr13_9 Reverse Primer
gggggccaatacacattctt

SEQ ID NO: 15326 - DNA, 20 bp, Artificial Sequence
  Chr13_9 Reverse Primer
atttgcaggccaggagaata

SEQ ID NO: 15327 - DNA, 20 bp, Artificial Sequence
  Chr13_9 Reverse Primer
aattgttggagggcacaatc

SEQ ID NO: 15328 - DNA, 20 bp, Artificial Sequence
  Chr13_9 Reverse Primer
ccactccctgaccctgagta

SEQ ID NO: 15329 - DNA, 20 bp, Artificial Sequence
  Chr13_9 Reverse Primer
gggtgtgttggaggtcattt

SEQ ID NO: 15330 - DNA, 20 bp, Artificial Sequence
  Chr13_9 Reverse Primer
aacctgctccagcctatcac

SEQ ID NO: 15331 - DNA, 27 bp, Artificial Sequence
  Chr13_9 Reverse Primer
ttttaacaattattccaacatttagca

SEQ ID NO: 15332 - DNA, 20 bp, Artificial Sequence
  Chr13_9 Reverse Primer
tggacttgggtgtcagattg

SEQ ID NO: 15333 - DNA, 20 bp, Artificial Sequence
  Chr13_9 Reverse Primer
tttgcaagggctatttcacc

SEQ ID NO: 15334 - DNA, 20 bp, Artificial Sequence
  Chr13_9 Reverse Primer
tcctggagagatgacctgct

SEQ ID NO: 15335 - DNA, 21 bp, Artificial Sequence
  Chr13_9 Reverse Primer
tcattctgattgtcaaagcca

SEQ ID NO: 15336 - DNA, 20 bp, Artificial Sequence
  Chr13_9 Reverse Primer
ggcaaggagggtagaaacct

SEQ ID NO: 15337 - DNA, 20 bp, Artificial Sequence
  Chr13_9 Reverse Primer
agctcagatgctggtgctct

SEQ ID NO: 15338 - DNA, 22 bp, Artificial Sequence
  Chr13_9 Reverse Primer
tggctcagcagtacattctcac

SEQ ID NO: 15339 - DNA, 20 bp, Artificial Sequence
  Chr13_9 Reverse Primer
acaatgcctcccatcaagac

SEQ ID NO: 15340 - DNA, 22 bp, Artificial Sequence
  Chr13_9 Reverse Primer
tttcctcaagagtcaggaatca

SEQ ID NO: 15341 - DNA, 20 bp, Artificial Sequence
  Chr13_9 Reverse Primer
gaagactttactggggcgtg

SEQ ID NO: 15342 - DNA, 23 bp, Artificial Sequence
  Chr13_9 Reverse Primer
tgaagcaggatgatatgtgaaga

SEQ ID NO: 15343 - DNA, 22 bp, Artificial Sequence
  Chr13_9 Reverse Primer
tttccaaaaggccagtcttaaa

SEQ ID NO: 15344 - DNA, 20 bp, Artificial Sequence
  Chr13_9 Reverse Primer
ttgctggcaggaaagtaaat

SEQ ID NO: 15345 - DNA, 22 bp, Artificial Sequence
  Chr13_9 Reverse Primer
ttcatctgagctctggacaaaa

SEQ ID NO: 15346 - DNA, 27 bp, Artificial Sequence
  Chr13_9 Reverse Primer
tgaaagctttacttttcttttcttttt

SEQ ID NO: 15347 - DNA, 20 bp, Artificial Sequence
  Chr13_9 Reverse Primer
tcagacacggaggatgactg

SEQ ID NO: 15348 - DNA, 25 bp, Artificial Sequence
  Chr13_9 Reverse Primer
tcactgcataattcatgtctaggaa

SEQ ID NO: 15349 - DNA, 20 bp, Artificial Sequence
  Chr13_9 Reverse Primer
cttcctcccttagctgatgc

SEQ ID NO: 15350 - DNA, 20 bp, Artificial Sequence
  Chr13_9 Reverse Primer
aaggcaagtggaagagggat

SEQ ID NO: 15351 - DNA, 21 bp, Artificial Sequence
  Chr13_9 Reverse Primer
tccgatgaaaagcttcatgtc

SEQ ID NO: 15352 - DNA, 20 bp, Artificial Sequence
  Chr13_9 Reverse Primer
ggaggctttagcatgcagat

SEQ ID NO: 15353 - DNA, 20 bp, Artificial Sequence
  Chr13_9 Reverse Primer
ttgttgacaaaatgcttgcc

SEQ ID NO: 15354 - DNA, 20 bp, Artificial Sequence
  Chr13_9 Reverse Primer
aggaatcacttgggaggctt

SEQ ID NO: 15355 - DNA, 24 bp, Artificial Sequence
  Chr13_9 Reverse Primer
tttagacttagaagtgcaagagca

SEQ ID NO: 15356 - DNA, 23 bp, Artificial Sequence
  Chr13_9 Reverse Primer
tgcacttcattctcagttattgc

SEQ ID NO: 15357 - DNA, 20 bp, Artificial Sequence
  Chr13_9 Reverse Primer
gcatacaccagccaacacac

SEQ ID NO: 15358 - DNA, 21 bp, Artificial Sequence
  Chr13_9 Reverse Primer
catgaaacagcacctttgtga

SEQ ID NO: 15359 - DNA, 20 bp, Artificial Sequence
  Chr13_9 Reverse Primer
gttgacaacagctaggggga

SEQ ID NO: 15360 - DNA, 20 bp, Artificial Sequence
  Chr13_9 Reverse Primer
atggaaggaatatgggagcc

SEQ ID NO: 15361 - DNA, 20 bp, Artificial Sequence
  Chr13_9 Reverse Primer
cccggggttttaatagagga

SEQ ID NO: 15362 - DNA, 20 bp, Artificial Sequence
  Chr13_9 Reverse Primer
caaagtctgttccgctgtca

SEQ ID NO: 15363 - DNA, 20 bp, Artificial Sequence
  Chr13_9 Reverse Primer
cagcatctaggtgtgggtgt

SEQ ID NO: 15364 - DNA, 20 bp, Artificial Sequence
  Chr13_9 Reverse Primer
cctgctttcagaaaaaccgt

SEQ ID NO: 15365 - DNA, 20 bp, Artificial Sequence
  Chr13_9 Reverse Primer
cccactgaatcatcaggaca

SEQ ID NO: 15366 - DNA, 20 bp, Artificial Sequence
  Chr13_9 Reverse Primer
cctgaaaatttgccttgctt

SEQ ID NO: 15367 - DNA, 20 bp, Artificial Sequence
  Chr13_9 Reverse Primer
gcagacagaagcaaggtgag

SEQ ID NO: 15368 - DNA, 20 bp, Artificial Sequence
  Chr13_9 Reverse Primer
ccaagattaaccctccacca

SEQ ID NO: 15369 - DNA, 20 bp, Artificial Sequence
  Chr13_9 Reverse Primer
tggagaagaccgaagaggaa

SEQ ID NO: 15370 - DNA, 25 bp, Artificial Sequence
  Chr13_9 Reverse Primer
tgtatcttaacataacgattgatgg

SEQ ID NO: 15371 - DNA, 20 bp, Artificial Sequence
  Chr13_9 Reverse Primer
ttctccccttgaattggctt

SEQ ID NO: 15372 - DNA, 21 bp, Artificial Sequence
  Chr13_9 Reverse Primer
tccccatgagattattggatt

SEQ ID NO: 15373 - DNA, 19 bp, Artificial Sequence
  Chr13_9 Reverse Primer
aacatttttgcagaggccc

SEQ ID NO: 15374 - DNA, 20 bp, Artificial Sequence
  Chr13_9 Reverse Primer
tccctctcactggattttcg

SEQ ID NO: 15375 - DNA, 21 bp, Artificial Sequence
  Chr13_9 Reverse Primer
catacttccaaggccagatga

SEQ ID NO: 15376 - DNA, 20 bp, Artificial Sequence
  Chr13_9 Reverse Primer
aaatgacttgcattcccagc

SEQ ID NO: 15377 - DNA, 20 bp, Artificial Sequence
  Chr13_10 Forward Primer
ttgcgtgtagatttcttgcg

SEQ ID NO: 15378 - DNA, 20 bp, Artificial Sequence
  Chr13_10 Forward Primer
aaccctatgcgtgtttttgg

SEQ ID NO: 15379 - DNA, 20 bp, Artificial Sequence
  Chr13_10 Forward Primer
tgaggatgtctctgcactgg

SEQ ID NO: 15380 - DNA, 20 bp, Artificial Sequence
  Chr13_10 Forward Primer
aggcctacagggacacacac

SEQ ID NO: 15381 - DNA, 20 bp, Artificial Sequence
  Chr13_10 Forward Primer
acggttggaggagaagacct

SEQ ID NO: 15382 - DNA, 20 bp, Artificial Sequence
  Chr13_10 Forward Primer
caggactcaggcgtcactgt

SEQ ID NO: 15383 - DNA, 20 bp, Artificial Sequence
  Chr13_10 Forward Primer
ccatctcatttccccgacta

SEQ ID NO: 15384 - DNA, 20 bp, Artificial Sequence
  Chr13_10 Forward Primer
gagctgtcctagctgccaag

SEQ ID NO: 15385 - DNA, 20 bp, Artificial Sequence
  Chr13_10 Forward Primer
aaggactgaggtccagagca

SEQ ID NO: 15386 - DNA, 20 bp, Artificial Sequence
  Chr13_10 Forward Primer
ccttttccacagaggggttt

SEQ ID NO: 15387 - DNA, 20 bp, Artificial Sequence
  Chr13_10 Forward Primer
tgttccctttttcatcccct

SEQ ID NO: 15388 - DNA, 20 bp, Artificial Sequence
  Chr13_10 Forward Primer
tggacagagttatttcccgc

SEQ ID NO: 15389 - DNA, 20 bp, Artificial Sequence
  Chr13_10 Forward Primer
gcaggcacttgtttgagtga

SEQ ID NO: 15390 - DNA, 21 bp, Artificial Sequence
  Chr13_10 Forward Primer
tgtgacaacagccatttacca

SEQ ID NO: 15391 - DNA, 20 bp, Artificial Sequence
  Chr13_10 Forward Primer
ggtcaaacaggtcagccaat

SEQ ID NO: 15392 - DNA, 20 bp, Artificial Sequence
  Chr13_10 Forward Primer
tctctacagcgtgtggatgc

SEQ ID NO: 15393 - DNA, 20 bp, Artificial Sequence
  Chr13_10 Forward Primer
tgtgtggttcctctccttcc

SEQ ID NO: 15394 - DNA, 20 bp, Artificial Sequence
  Chr13_10 Forward Primer
gagtgcgtatgtgctcagga

SEQ ID NO: 15395 - DNA, 20 bp, Artificial Sequence
  Chr13_10 Forward Primer
ctcaaacctgatctgggagc

SEQ ID NO: 15396 - DNA, 20 bp, Artificial Sequence
  Chr13_10 Forward Primer
ttagctcccgtggaacagat

SEQ ID NO: 15397 - DNA, 20 bp, Artificial Sequence
  Chr13_10 Forward Primer
gctctgcagacggagtcttt

SEQ ID NO: 15398 - DNA, 20 bp, Artificial Sequence
  Chr13_10 Forward Primer
gttgcctcccatttagaacg

SEQ ID NO: 15399 - DNA, 20 bp, Artificial Sequence
  Chr13_10 Forward Primer
aaaggtgtttttgtggtggc

SEQ ID NO: 15400 - DNA, 20 bp, Artificial Sequence
  Chr13_10 Forward Primer
cagatgcgtgtgactgaggt

SEQ ID NO: 15401 - DNA, 20 bp, Artificial Sequence
  Chr13_10 Forward Primer
aatgcctctgctcttctcca

SEQ ID NO: 15402 - DNA, 19 bp, Artificial Sequence
  Chr13_10 Forward Primer
aactgcccgttttcctcct

SEQ ID NO: 15403 - DNA, 20 bp, Artificial Sequence
  Chr13_10 Forward Primer
ctgcactggttctcctcaca

SEQ ID NO: 15404 - DNA, 20 bp, Artificial Sequence
  Chr13_10 Forward Primer
ttgcttaggaagcaggcagt

SEQ ID NO: 15405 - DNA, 20 bp, Artificial Sequence
  Chr13_10 Forward Primer
tcagcagtcatcttgttgcc

SEQ ID NO: 15406 - DNA, 20 bp, Artificial Sequence
  Chr13_10 Forward Primer
taagatgccctgagtgctga

SEQ ID NO: 15407 - DNA, 20 bp, Artificial Sequence
  Chr13_10 Forward Primer
cctccacttgagctgtttcc

SEQ ID NO: 15408 - DNA, 20 bp, Artificial Sequence
  Chr13_10 Forward Primer
gcctggccttttcttattcc

SEQ ID NO: 15409 - DNA, 20 bp, Artificial Sequence
  Chr13_10 Forward Primer
catgcctttgggatgaaact

SEQ ID NO: 15410 - DNA, 20 bp, Artificial Sequence
  Chr13_10 Forward Primer
ttgagctgaaccattggaca

SEQ ID NO: 15411 - DNA, 20 bp, Artificial Sequence
  Chr13_10 Forward Primer
cctatcacgggagcaatgtt

SEQ ID NO: 15412 - DNA, 21 bp, Artificial Sequence
  Chr13_10 Forward Primer
cttttgagaattggaaagggg

SEQ ID NO: 15413 - DNA, 20 bp, Artificial Sequence
  Chr13_10 Forward Primer
gatggatcagggggaacttt

SEQ ID NO: 15414 - DNA, 20 bp, Artificial Sequence
  Chr13_10 Forward Primer
attctggaagccagggaagt

SEQ ID NO: 15415 - DNA, 20 bp, Artificial Sequence
  Chr13_10 Forward Primer
gagcagctactgatgtggca

SEQ ID NO: 15416 - DNA, 20 bp, Artificial Sequence
  Chr13_10 Forward Primer
aggtgactgtgctggtaggg

SEQ ID NO: 15417 - DNA, 20 bp, Artificial Sequence
  Chr13_10 Forward Primer
caccaccatcaacgtttcac

SEQ ID NO: 15418 - DNA, 20 bp, Artificial Sequence
  Chr13_10 Forward Primer
agattgtagccactctgggg

SEQ ID NO: 15419 - DNA, 20 bp, Artificial Sequence
  Chr13_10 Forward Primer
gctggatgagtaaggcagga

SEQ ID NO: 15420 - DNA, 20 bp, Artificial Sequence
  Chr13_10 Forward Primer
ccagtcctcgcaaacttctc

SEQ ID NO: 15421 - DNA, 20 bp, Artificial Sequence
  Chr13_10 Forward Primer
gaccaccctgacagctcttg

SEQ ID NO: 15422 - DNA, 20 bp, Artificial Sequence
  Chr13_10 Forward Primer
attccagcctccgctattct

SEQ ID NO: 15423 - DNA, 20 bp, Artificial Sequence
  Chr13_10 Forward Primer
aacctgctcttttgtgtgga

SEQ ID NO: 15424 - DNA, 20 bp, Artificial Sequence
  Chr13_10 Forward Primer
gggacaacttgctgtggatt

SEQ ID NO: 15425 - DNA, 20 bp, Artificial Sequence
  Chr13_10 Forward Primer
tccttgggcaacagagactt

SEQ ID NO: 15426 - DNA, 20 bp, Artificial Sequence
  Chr13_10 Forward Primer
agtgtccagaatgaggtggg

SEQ ID NO: 15427 - DNA, 20 bp, Artificial Sequence
  Chr13_10 Forward Primer
gcacacagctatgtcaggga

SEQ ID NO: 15428 - DNA, 20 bp, Artificial Sequence
  Chr13_10 Forward Primer
aacccaggattcttttggct

SEQ ID NO: 15429 - DNA, 20 bp, Artificial Sequence
  Chr13_10 Forward Primer
tgcagaagtgtgcagagagg

SEQ ID NO: 15430 - DNA, 20 bp, Artificial Sequence
  Chr13_10 Forward Primer
ttacagacggtggctcacac

SEQ ID NO: 15431 - DNA, 20 bp, Artificial Sequence
  Chr13_10 Forward Primer
ctaaagcctagggctgaccc

SEQ ID NO: 15432 - DNA, 20 bp, Artificial Sequence
  Chr13_10 Forward Primer
aacttttccaggtgagtgcc

SEQ ID NO: 15433 - DNA, 20 bp, Artificial Sequence
  Chr13_10 Forward Primer
tgctgttctggtctggaaaa

SEQ ID NO: 15434 - DNA, 24 bp, Artificial Sequence
  Chr13_10 Forward Primer
tttcccattaacttcatttaagcc

SEQ ID NO: 15435 - DNA, 20 bp, Artificial Sequence
  Chr13_10 Forward Primer
gcaaattgcacctccaaagt

SEQ ID NO: 15436 - DNA, 20 bp, Artificial Sequence
  Chr13_10 Forward Primer
aaggctccagtcctttctgc

SEQ ID NO: 15437 - DNA, 25 bp, Artificial Sequence
  Chr13_10 Forward Primer
ttgtacttatttctggagacaatgg

SEQ ID NO: 15438 - DNA, 20 bp, Artificial Sequence
  Chr13_10 Forward Primer
accgagcattcagcaaaagt

SEQ ID NO: 15439 - DNA, 20 bp, Artificial Sequence
  Chr13_10 Forward Primer
agcaagccactgaactccat

SEQ ID NO: 15440 - DNA, 20 bp, Artificial Sequence
  Chr13_10 Forward Primer
aacgcagaatcctcaccttc

SEQ ID NO: 15441 - DNA, 20 bp, Artificial Sequence
  Chr13_10 Forward Primer
gggtgagagagggaagctct

SEQ ID NO: 15442 - DNA, 20 bp, Artificial Sequence
  Chr13_10 Forward Primer
tggtggtgggagaaaatgat

SEQ ID NO: 15443 - DNA, 20 bp, Artificial Sequence
  Chr13_10 Forward Primer
caggatccatttccctgaga

SEQ ID NO: 15444 - DNA, 20 bp, Artificial Sequence
  Chr13_10 Forward Primer
cattggtttgtgaaagccct

SEQ ID NO: 15445 - DNA, 20 bp, Artificial Sequence
  Chr13_10 Forward Primer
ggaacttccctcaaaggagc

SEQ ID NO: 15446 - DNA, 20 bp, Artificial Sequence
  Chr13_10 Forward Primer
caggaaggaacccattcaga

SEQ ID NO: 15447 - DNA, 20 bp, Artificial Sequence
  Chr13_10 Forward Primer
gcatctgtagagaggtgggc

SEQ ID NO: 15448 - DNA, 20 bp, Artificial Sequence
  Chr13_10 Forward Primer
acagccatcccttcaaaaca

SEQ ID NO: 15449 - DNA, 20 bp, Artificial Sequence
  Chr13_10 Forward Primer
atgtggccaaatgtgttcaa

SEQ ID NO: 15450 - DNA, 20 bp, Artificial Sequence
  Chr13_10 Forward Primer
cctgagccagaggaaaagtg

SEQ ID NO: 15451 - DNA, 20 bp, Artificial Sequence
  Chr13_10 Forward Primer
tcctcaggagaatgtgagca

SEQ ID NO: 15452 - DNA, 20 bp, Artificial Sequence
  Chr13_10 Forward Primer
tttggaagctggaactctgc

SEQ ID NO: 15453 - DNA, 18 bp, Artificial Sequence
  Chr13_10 Forward Primer
gccctggtgtgtgccttt

SEQ ID NO: 15454 - DNA, 20 bp, Artificial Sequence
  Chr13_10 Forward Primer
gatgaactacgacgggaacc

SEQ ID NO: 15455 - DNA, 20 bp, Artificial Sequence
  Chr13_10 Forward Primer
cagctatgtgggaatcagca

SEQ ID NO: 15456 - DNA, 20 bp, Artificial Sequence
  Chr13_10 Forward Primer
agcagctggtgtcctctgtt

SEQ ID NO: 15457 - DNA, 20 bp, Artificial Sequence
  Chr13_10 Forward Primer
aagttctgaaaatgccaccg

SEQ ID NO: 15458 - DNA, 21 bp, Artificial Sequence
  Chr13_10 Forward Primer
ttccaatagaggaggtggatg

SEQ ID NO: 15459 - DNA, 20 bp, Artificial Sequence
  Chr13_10 Forward Primer
catggatggagtgaccatga

SEQ ID NO: 15460 - DNA, 20 bp, Artificial Sequence
  Chr13_10 Forward Primer
ttctgcactgtctcagggtg

SEQ ID NO: 15461 - DNA, 20 bp, Artificial Sequence
  Chr13_10 Forward Primer
tgttgaatgcacggatgaat

SEQ ID NO: 15462 - DNA, 20 bp, Artificial Sequence
  Chr13_10 Forward Primer
gcacagtgctgacacgctat

SEQ ID NO: 15463 - DNA, 20 bp, Artificial Sequence
  Chr13_10 Forward Primer
ctcctgagtagcggtggttc

SEQ ID NO: 15464 - DNA, 20 bp, Artificial Sequence
  Chr13_10 Forward Primer
tcatctgattccaaggaccc

SEQ ID NO: 15465 - DNA, 20 bp, Artificial Sequence
  Chr13_10 Forward Primer
ataggtggtcaggctttccc

SEQ ID NO: 15466 - DNA, 20 bp, Artificial Sequence
  Chr13_10 Forward Primer
catgcttccccaggtacagt

SEQ ID NO: 15467 - DNA, 20 bp, Artificial Sequence
  Chr13_10 Forward Primer
tggaatccaccacaggaaat

SEQ ID NO: 15468 - DNA, 20 bp, Artificial Sequence
  Chr13_10 Forward Primer
aaggcagctattgtgatggg

SEQ ID NO: 15469 - DNA, 20 bp, Artificial Sequence
  Chr13_10 Forward Primer
agctgcctcacatctggtct

SEQ ID NO: 15470 - DNA, 20 bp, Artificial Sequence
  Chr13_10 Forward Primer
tttccccagtggttcaaaag

SEQ ID NO: 15471 - DNA, 20 bp, Artificial Sequence
  Chr13_10 Forward Primer
aagaactgcaggaaaggggt

SEQ ID NO: 15472 - DNA, 20 bp, Artificial Sequence
  Chr13_10 Forward Primer
gctagggttgtggaattgct

SEQ ID NO: 15473 - DNA, 20 bp, Artificial Sequence
  Chr13_10 Reverse Primer
cgcgtcttcactcaccctat

SEQ ID NO: 15474 - DNA, 20 bp, Artificial Sequence
  Chr13_10 Reverse Primer
tgccaaagctaggaaggaga

SEQ ID NO: 15475 - DNA, 20 bp, Artificial Sequence
  Chr13_10 Reverse Primer
tcaggaagacaagtccctgc

SEQ ID NO: 15476 - DNA, 20 bp, Artificial Sequence
  Chr13_10 Reverse Primer
aatggatggcagagaccttg

SEQ ID NO: 15477 - DNA, 20 bp, Artificial Sequence
  Chr13_10 Reverse Primer
aaccccaaccttcaagatga

SEQ ID NO: 15478 - DNA, 20 bp, Artificial Sequence
  Chr13_10 Reverse Primer
aggaggacagaggagagggt

SEQ ID NO: 15479 - DNA, 20 bp, Artificial Sequence
  Chr13_10 Reverse Primer
cacccctgaaagcctcacta

SEQ ID NO: 15480 - DNA, 20 bp, Artificial Sequence
  Chr13_10 Reverse Primer
tgtcaatgccaaagacaagg

SEQ ID NO: 15481 - DNA, 20 bp, Artificial Sequence
  Chr13_10 Reverse Primer
ggtgcctcagtgttgagtga

SEQ ID NO: 15482 - DNA, 20 bp, Artificial Sequence
  Chr13_10 Reverse Primer
cttgagcccaaccagctaag

SEQ ID NO: 15483 - DNA, 26 bp, Artificial Sequence
  Chr13_10 Reverse Primer
aagaactcaaggtctgttttgttcta

SEQ ID NO: 15484 - DNA, 20 bp, Artificial Sequence
  Chr13_10 Reverse Primer
aagttcattccttctgggca

SEQ ID NO: 15485 - DNA, 20 bp, Artificial Sequence
  Chr13_10 Reverse Primer
tttgaaaggagctggtttgg

SEQ ID NO: 15486 - DNA, 21 bp, Artificial Sequence
  Chr13_10 Reverse Primer
tcctctccctgaagtcctctc

SEQ ID NO: 15487 - DNA, 20 bp, Artificial Sequence
  Chr13_10 Reverse Primer
cagtgcaaatcatattgccg

SEQ ID NO: 15488 - DNA, 20 bp, Artificial Sequence
  Chr13_10 Reverse Primer
ccgtcctgtaggagtaccca

SEQ ID NO: 15489 - DNA, 20 bp, Artificial Sequence
  Chr13_10 Reverse Primer
cagattccagacaccccact

SEQ ID NO: 15490 - DNA, 20 bp, Artificial Sequence
  Chr13_10 Reverse Primer
aaatcctgagctgtgcaacc

SEQ ID NO: 15491 - DNA, 20 bp, Artificial Sequence
  Chr13_10 Reverse Primer
cactttagcagccaggaacc

SEQ ID NO: 15492 - DNA, 20 bp, Artificial Sequence
  Chr13_10 Reverse Primer
agcagacaccacagagtccc

SEQ ID NO: 15493 - DNA, 20 bp, Artificial Sequence
  Chr13_10 Reverse Primer
gttgaatggcagaagcacaa

SEQ ID NO: 15494 - DNA, 20 bp, Artificial Sequence
  Chr13_10 Reverse Primer
aaatcacccttgaaagctgg

SEQ ID NO: 15495 - DNA, 20 bp, Artificial Sequence
  Chr13_10 Reverse Primer
cagagagaggcgaaggaaaa

SEQ ID NO: 15496 - DNA, 20 bp, Artificial Sequence
  Chr13_10 Reverse Primer
acagcaaacgtggaatggat

SEQ ID NO: 15497 - DNA, 20 bp, Artificial Sequence
  Chr13_10 Reverse Primer
gttacgtcagggagaaccca

SEQ ID NO: 15498 - DNA, 20 bp, Artificial Sequence
  Chr13_10 Reverse Primer
cctccctcagcctacacctc

SEQ ID NO: 15499 - DNA, 20 bp, Artificial Sequence
  Chr13_10 Reverse Primer
cactcctgtgatatgcagcg

SEQ ID NO: 15500 - DNA, 20 bp, Artificial Sequence
  Chr13_10 Reverse Primer
ggacaagtcacgtaggggtg

SEQ ID NO: 15501 - DNA, 20 bp, Artificial Sequence
  Chr13_10 Reverse Primer
taacccactcggcttcagac

SEQ ID NO: 15502 - DNA, 20 bp, Artificial Sequence
  Chr13_10 Reverse Primer
ttcctgaagacagggaatgg

SEQ ID NO: 15503 - DNA, 20 bp, Artificial Sequence
  Chr13_10 Reverse Primer
tctttgccaggagacaggag

SEQ ID NO: 15504 - DNA, 20 bp, Artificial Sequence
  Chr13_10 Reverse Primer
ctcaaccccagtgcttcttc

SEQ ID NO: 15505 - DNA, 20 bp, Artificial Sequence
  Chr13_10 Reverse Primer
gcgcgttaagtgacaggttt

SEQ ID NO: 15506 - DNA, 20 bp, Artificial Sequence
  Chr13_10 Reverse Primer
gctcacaccctacagccttc

SEQ ID NO: 15507 - DNA, 20 bp, Artificial Sequence
  Chr13_10 Reverse Primer
cggctcatagcttgtgacag

SEQ ID NO: 15508 - DNA, 22 bp, Artificial Sequence
  Chr13_10 Reverse Primer
aagcaggtgaaactgtcattca

SEQ ID NO: 15509 - DNA, 20 bp, Artificial Sequence
  Chr13_10 Reverse Primer
aggcagcttccttatcccat

SEQ ID NO: 15510 - DNA, 20 bp, Artificial Sequence
  Chr13_10 Reverse Primer
agaagcaaggcaattacgga

SEQ ID NO: 15511 - DNA, 20 bp, Artificial Sequence
  Chr13_10 Reverse Primer
aatacaaagggcgcactgac

SEQ ID NO: 15512 - DNA, 20 bp, Artificial Sequence
  Chr13_10 Reverse Primer
aggagtggtgacattcgagg

SEQ ID NO: 15513 - DNA, 20 bp, Artificial Sequence
  Chr13_10 Reverse Primer
ttccacaatgtcaaggctga

SEQ ID NO: 15514 - DNA, 20 bp, Artificial Sequence
  Chr13_10 Reverse Primer
acctgaaatctggggcttct

SEQ ID NO: 15515 - DNA, 20 bp, Artificial Sequence
  Chr13_10 Reverse Primer
ctagtggggttgccaaagaa

SEQ ID NO: 15516 - DNA, 20 bp, Artificial Sequence
  Chr13_10 Reverse Primer
tttaccccacgccagaatag

SEQ ID NO: 15517 - DNA, 20 bp, Artificial Sequence
  Chr13_10 Reverse Primer
agcccacagctgattgattc

SEQ ID NO: 15518 - DNA, 20 bp, Artificial Sequence
  Chr13_10 Reverse Primer
tgctcctaaccctcaaagga

SEQ ID NO: 15519 - DNA, 20 bp, Artificial Sequence
  Chr13_10 Reverse Primer
tagcggcaacaaatcaacaa

SEQ ID NO: 15520 - DNA, 20 bp, Artificial Sequence
  Chr13_10 Reverse Primer
agacatgaccacaaggctcc

SEQ ID NO: 15521 - DNA, 20 bp, Artificial Sequence
  Chr13_10 Reverse Primer
acagcactgtgttgcatggt

SEQ ID NO: 15522 - DNA, 20 bp, Artificial Sequence
  Chr13_10 Reverse Primer
tggaccaagtgcagagtttg

SEQ ID NO: 15523 - DNA, 20 bp, Artificial Sequence
  Chr13_10 Reverse Primer
ggcatttcaggaaggcataa

SEQ ID NO: 15524 - DNA, 20 bp, Artificial Sequence
  Chr13_10 Reverse Primer
gagcgttcctccacagtttc

SEQ ID NO: 15525 - DNA, 20 bp, Artificial Sequence
  Chr13_10 Reverse Primer
gaaaacaggggacagtcagc

SEQ ID NO: 15526 - DNA, 19 bp, Artificial Sequence
  Chr13_10 Reverse Primer
cagtggagctgggaagagg

SEQ ID NO: 15527 - DNA, 20 bp, Artificial Sequence
  Chr13_10 Reverse Primer
ccaagtccctgcctcatcta

SEQ ID NO: 15528 - DNA, 20 bp, Artificial Sequence
  Chr13_10 Reverse Primer
gaaccaaagaaactgccacc

SEQ ID NO: 15529 - DNA, 20 bp, Artificial Sequence
  Chr13_10 Reverse Primer
ccggaggagaaaagtcacag

SEQ ID NO: 15530 - DNA, 20 bp, Artificial Sequence
  Chr13_10 Reverse Primer
tgatttggtcccagatttcc

SEQ ID NO: 15531 - DNA, 20 bp, Artificial Sequence
  Chr13_10 Reverse Primer
gcttcagccgtaggtttctg

SEQ ID NO: 15532 - DNA, 23 bp, Artificial Sequence
  Chr13_10 Reverse Primer
tctgcacagtcatggtataggaa

SEQ ID NO: 15533 - DNA, 21 bp, Artificial Sequence
  Chr13_10 Reverse Primer
gcaaacctaaaaatgatggca

SEQ ID NO: 15534 - DNA, 20 bp, Artificial Sequence
  Chr13_10 Reverse Primer
ttggctgaaggaaataaggc

SEQ ID NO: 15535 - DNA, 20 bp, Artificial Sequence
  Chr13_10 Reverse Primer
gcacattcatgcaggtagga

SEQ ID NO: 15536 - DNA, 19 bp, Artificial Sequence
  Chr13_10 Reverse Primer
gaattccccagacacccac

SEQ ID NO: 15537 - DNA, 20 bp, Artificial Sequence
  Chr13_10 Reverse Primer
aagagaagtccttgccgtga

SEQ ID NO: 15538 - DNA, 20 bp, Artificial Sequence
  Chr13_10 Reverse Primer
ttatcccgagctgtcattcc

SEQ ID NO: 15539 - DNA, 20 bp, Artificial Sequence
  Chr13_10 Reverse Primer
agtctgtttgtgcccaggat

SEQ ID NO: 15540 - DNA, 20 bp, Artificial Sequence
  Chr13_10 Reverse Primer
ttggtgaagcttgagtgctg

SEQ ID NO: 15541 - DNA, 19 bp, Artificial Sequence
  Chr13_10 Reverse Primer
agtctcccccgtgaagatg

SEQ ID NO: 15542 - DNA, 20 bp, Artificial Sequence
  Chr13_10 Reverse Primer
cgggacccggtctaataaat

SEQ ID NO: 15543 - DNA, 19 bp, Artificial Sequence
  Chr13_10 Reverse Primer
aggttgatttgggccaatg

SEQ ID NO: 15544 - DNA, 20 bp, Artificial Sequence
  Chr13_10 Reverse Primer
ctgtggcccaattcaagttt

SEQ ID NO: 15545 - DNA, 20 bp, Artificial Sequence
  Chr13_10 Reverse Primer
gtgatgacccggtgaatttt

SEQ ID NO: 15546 - DNA, 20 bp, Artificial Sequence
  Chr13_10 Reverse Primer
gcccctcccctacttttatg

SEQ ID NO: 15547 - DNA, 20 bp, Artificial Sequence
  Chr13_10 Reverse Primer
agcctgccttctttctaggg

SEQ ID NO: 15548 - DNA, 20 bp, Artificial Sequence
  Chr13_10 Reverse Primer
agagaatcgagggggtgttt

SEQ ID NO: 15549 - DNA, 20 bp, Artificial Sequence
  Chr13_10 Reverse Primer
cccattaaagaaggccaagg

SEQ ID NO: 15550 - DNA, 20 bp, Artificial Sequence
  Chr13_10 Reverse Primer
ttactccagggtaagcccct

SEQ ID NO: 15551 - DNA, 20 bp, Artificial Sequence
  Chr13_10 Reverse Primer
gggccaggacactgaatcta

SEQ ID NO: 15552 - DNA, 20 bp, Artificial Sequence
  Chr13_10 Reverse Primer
gagttgcaaagattcacgca

SEQ ID NO: 15553 - DNA, 20 bp, Artificial Sequence
  Chr13_10 Reverse Primer
cttagacagccccaagcaag

SEQ ID NO: 15554 - DNA, 20 bp, Artificial Sequence
  Chr13_10 Reverse Primer
tgctgacatgaacccaaaaa

SEQ ID NO: 15555 - DNA, 20 bp, Artificial Sequence
  Chr13_10 Reverse Primer
cagggacattggctctcttc

SEQ ID NO: 15556 - DNA, 20 bp, Artificial Sequence
  Chr13_10 Reverse Primer
ctgccaaaatcatcattgga

SEQ ID NO: 15557 - DNA, 20 bp, Artificial Sequence
  Chr13_10 Reverse Primer
ttggatcctccaagcaaact

SEQ ID NO: 15558 - DNA, 20 bp, Artificial Sequence
  Chr13_10 Reverse Primer
cgagcctccagtcacatttt

SEQ ID NO: 15559 - DNA, 20 bp, Artificial Sequence
  Chr13_10 Reverse Primer
gcgcctggccttaattagat

SEQ ID NO: 15560 - DNA, 20 bp, Artificial Sequence
  Chr13_10 Reverse Primer
ccaagagtgagagacgggag

SEQ ID NO: 15561 - DNA, 20 bp, Artificial Sequence
  Chr13_10 Reverse Primer
tgacttcctgatgaggggac

SEQ ID NO: 15562 - DNA, 20 bp, Artificial Sequence
  Chr13_10 Reverse Primer
agtgaggaggctgagatgga

SEQ ID NO: 15563 - DNA, 20 bp, Artificial Sequence
  Chr13_10 Reverse Primer
ggttacacagcttggccatt

SEQ ID NO: 15564 - DNA, 20 bp, Artificial Sequence
  Chr13_10 Reverse Primer
cattcctgaaccacacagga

SEQ ID NO: 15565 - DNA, 20 bp, Artificial Sequence
  Chr13_10 Reverse Primer
tcactgcagtcacccttcct

SEQ ID NO: 15566 - DNA, 20 bp, Artificial Sequence
  Chr13_10 Reverse Primer
ttgttctctgggactccacc

SEQ ID NO: 15567 - DNA, 20 bp, Artificial Sequence
  Chr13_10 Reverse Primer
tctcggatggcttgaaaagt

SEQ ID NO: 15568 - DNA, 20 bp, Artificial Sequence
  Chr13_10 Reverse Primer
aaggatgggcctgtcttctt

SEQ ID NO: 15569 - DNA, 20 bp, Artificial Sequence
  Chr17_1 Forward Primer
tcttggctactcaggagcgt

SEQ ID NO: 15570 - DNA, 20 bp, Artificial Sequence
  Chr17_1 Forward Primer
acagaaagtgagggtggtgg

SEQ ID NO: 15571 - DNA, 20 bp, Artificial Sequence
  Chr17_1 Forward Primer
tctcttcagtgggcattgtg

SEQ ID NO: 15572 - DNA, 20 bp, Artificial Sequence
  Chr17_1 Forward Primer
acaatgaggtcaaggccaag

SEQ ID NO: 15573 - DNA, 20 bp, Artificial Sequence
  Chr17_1 Forward Primer
cccagagataggctggaaaa

SEQ ID NO: 15574 - DNA, 20 bp, Artificial Sequence
  Chr17_1 Forward Primer
tatgaaccccaacagtgggt

SEQ ID NO: 15575 - DNA, 20 bp, Artificial Sequence
  Chr17_1 Forward Primer
cccagagttgttaggcctgt

SEQ ID NO: 15576 - DNA, 20 bp, Artificial Sequence
  Chr17_1 Forward Primer
gtcttttggagaggggatgg

SEQ ID NO: 15577 - DNA, 20 bp, Artificial Sequence
  Chr17_1 Forward Primer
acgttctgggccctattctt

SEQ ID NO: 15578 - DNA, 20 bp, Artificial Sequence
  Chr17_1 Forward Primer
ctagcctggctgagaagtgg

SEQ ID NO: 15579 - DNA, 20 bp, Artificial Sequence
  Chr17_1 Forward Primer
atcttgcctcgtgtgaaacc

SEQ ID NO: 15580 - DNA, 20 bp, Artificial Sequence
  Chr17_1 Forward Primer
cttcaccagtggcacagcta

SEQ ID NO: 15581 - DNA, 20 bp, Artificial Sequence
  Chr17_1 Forward Primer
gcgccagaaaatactttgga

SEQ ID NO: 15582 - DNA, 20 bp, Artificial Sequence
  Chr17_1 Forward Primer
tttgtgagcagacctggaga

SEQ ID NO: 15583 - DNA, 20 bp, Artificial Sequence
  Chr17_1 Forward Primer
tgttaggaggatcaccctgg

SEQ ID NO: 15584 - DNA, 20 bp, Artificial Sequence
  Chr17_1 Forward Primer
ttagttacgggcagtggctt

SEQ ID NO: 15585 - DNA, 20 bp, Artificial Sequence
  Chr17_1 Forward Primer
tggtgccatttgaacaccta

SEQ ID NO: 15586 - DNA, 21 bp, Artificial Sequence
  Chr17_1 Forward Primer
ggttggagctgtttatgctga

SEQ ID NO: 15587 - DNA, 20 bp, Artificial Sequence
  Chr17_1 Forward Primer
ggttctgtggaagagaacgg

SEQ ID NO: 15588 - DNA, 20 bp, Artificial Sequence
  Chr17_1 Forward Primer
ctcagccctgactgcagagt

SEQ ID NO: 15589 - DNA, 20 bp, Artificial Sequence
  Chr17_1 Forward Primer
agccgtcgttactagcctca

SEQ ID NO: 15590 - DNA, 20 bp, Artificial Sequence
  Chr17_1 Forward Primer
caaaggctgtctccatccac

SEQ ID NO: 15591 - DNA, 20 bp, Artificial Sequence
  Chr17_1 Forward Primer
ctcactaaaaagccgcttgg

SEQ ID NO: 15592 - DNA, 20 bp, Artificial Sequence
  Chr17_1 Forward Primer
gccatctcccaacttctctg

SEQ ID NO: 15593 - DNA, 20 bp, Artificial Sequence
  Chr17_1 Forward Primer
gctttccccgtttgaaagat

SEQ ID NO: 15594 - DNA, 20 bp, Artificial Sequence
  Chr17_1 Forward Primer
aagtgggaggtgtcagatgc

SEQ ID NO: 15595 - DNA, 21 bp, Artificial Sequence
  Chr17_1 Forward Primer
gcagaaaagtaaggcaatccc

SEQ ID NO: 15596 - DNA, 20 bp, Artificial Sequence
  Chr17_1 Forward Primer
gaaccgtgggtgaacctaaa

SEQ ID NO: 15597 - DNA, 20 bp, Artificial Sequence
  Chr17_1 Forward Primer
atggtccaatcattcaagcc

SEQ ID NO: 15598 - DNA, 20 bp, Artificial Sequence
  Chr17_1 Forward Primer
gtgtcctgagagtcgcatca

SEQ ID NO: 15599 - DNA, 20 bp, Artificial Sequence
  Chr17_1 Forward Primer
accctaagccctggtgtttt

SEQ ID NO: 15600 - DNA, 20 bp, Artificial Sequence
  Chr17_1 Forward Primer
gaaacccctctcttttcccc

SEQ ID NO: 15601 - DNA, 20 bp, Artificial Sequence
  Chr17_1 Forward Primer
gagagtgcctttctggatgc

SEQ ID NO: 15602 - DNA, 20 bp, Artificial Sequence
  Chr17_1 Forward Primer
gctctccctgcttcatgtgt

SEQ ID NO: 15603 - DNA, 20 bp, Artificial Sequence
  Chr17_1 Forward Primer
caggtgtgcagagctgagag

SEQ ID NO: 15604 - DNA, 20 bp, Artificial Sequence
  Chr17_1 Forward Primer
ggccatgagccattagtgtt

SEQ ID NO: 15605 - DNA, 20 bp, Artificial Sequence
  Chr17_1 Forward Primer
tccagattgctgcagtttca

SEQ ID NO: 15606 - DNA, 20 bp, Artificial Sequence
  Chr17_1 Forward Primer
ggagcaatggtctcttccaa

SEQ ID NO: 15607 - DNA, 20 bp, Artificial Sequence
  Chr17_1 Forward Primer
ggggcttaattagagctggc

SEQ ID NO: 15608 - DNA, 20 bp, Artificial Sequence
  Chr17_1 Forward Primer
ggcagcttcgatatttgcat

SEQ ID NO: 15609 - DNA, 20 bp, Artificial Sequence
  Chr17_1 Forward Primer
atggtggtgctcatctagcc

SEQ ID NO: 15610 - DNA, 20 bp, Artificial Sequence
  Chr17_1 Forward Primer
cctcatccttctgaagctgg

SEQ ID NO: 15611 - DNA, 20 bp, Artificial Sequence
  Chr17_1 Forward Primer
caaggccccattctcagtta

SEQ ID NO: 15612 - DNA, 20 bp, Artificial Sequence
  Chr17_1 Forward Primer
ccctggggatcctagaaaag

SEQ ID NO: 15613 - DNA, 20 bp, Artificial Sequence
  Chr17_1 Forward Primer
tgcaggatcaggatgaggat

SEQ ID NO: 15614 - DNA, 20 bp, Artificial Sequence
  Chr17_1 Forward Primer
ctgctccctgtgatgaaggt

SEQ ID NO: 15615 - DNA, 20 bp, Artificial Sequence
  Chr17_1 Forward Primer
ttggacgtactaccgaggct

SEQ ID NO: 15616 - DNA, 20 bp, Artificial Sequence
  Chr17_1 Forward Primer
gtttgtgcagtgttcccctt

SEQ ID NO: 15617 - DNA, 20 bp, Artificial Sequence
  Chr17_1 Forward Primer
acctcttcctccttggaagc

SEQ ID NO: 15618 - DNA, 20 bp, Artificial Sequence
  Chr17_1 Forward Primer
tcttgggtgggaacaaagtc

SEQ ID NO: 15619 - DNA, 20 bp, Artificial Sequence
  Chr17_1 Forward Primer
tctggcactcctgacaaatg

SEQ ID NO: 15620 - DNA, 20 bp, Artificial Sequence
  Chr17_1 Forward Primer
actgtgcttaccctaccccc

SEQ ID NO: 15621 - DNA, 20 bp, Artificial Sequence
  Chr17_1 Forward Primer
gtcttggcatcttgatgggt

SEQ ID NO: 15622 - DNA, 20 bp, Artificial Sequence
  Chr17_1 Forward Primer
cgagggatgttaccaccttt

SEQ ID NO: 15623 - DNA, 20 bp, Artificial Sequence
  Chr17_1 Forward Primer
gtcaggagcaagagtttggc

SEQ ID NO: 15624 - DNA, 20 bp, Artificial Sequence
  Chr17_1 Reverse Primer
agtgcagggctatgaggcta

SEQ ID NO: 15625 - DNA, 20 bp, Artificial Sequence
  Chr17_1 Reverse Primer
tctcctgagggccaatctaa

SEQ ID NO: 15626 - DNA, 20 bp, Artificial Sequence
  Chr17_1 Reverse Primer
agtgctctggccaaactgat

SEQ ID NO: 15627 - DNA, 20 bp, Artificial Sequence
  Chr17_1 Reverse Primer
ggaagaatgtgaaggccaga

SEQ ID NO: 15628 - DNA, 20 bp, Artificial Sequence
  Chr17_1 Reverse Primer
gagcatatcatcaccagcca

SEQ ID NO: 15629 - DNA, 20 bp, Artificial Sequence
  Chr17_1 Reverse Primer
gggaacaaggtctgggaaat

SEQ ID NO: 15630 - DNA, 20 bp, Artificial Sequence
  Chr17_1 Reverse Primer
gcctgggtagtgtgtggtct

SEQ ID NO: 15631 - DNA, 20 bp, Artificial Sequence
  Chr17_1 Reverse Primer
tgggtcctagaagctcgaag

SEQ ID NO: 15632 - DNA, 20 bp, Artificial Sequence
  Chr17_1 Reverse Primer
ccactggggttcagtcagat

SEQ ID NO: 15633 - DNA, 20 bp, Artificial Sequence
  Chr17_1 Reverse Primer
tctgagttccctgtcaagca

SEQ ID NO: 15634 - DNA, 20 bp, Artificial Sequence
  Chr17_1 Reverse Primer
tcatttcctccagacaaccc

SEQ ID NO: 15635 - DNA, 20 bp, Artificial Sequence
  Chr17_1 Reverse Primer
aacctacctcgagcaaagca

SEQ ID NO: 15636 - DNA, 20 bp, Artificial Sequence
  Chr17_1 Reverse Primer
gagatggagcagaaaggcag

SEQ ID NO: 15637 - DNA, 20 bp, Artificial Sequence
  Chr17_1 Reverse Primer
ttccacttacccagagccat

SEQ ID NO: 15638 - DNA, 20 bp, Artificial Sequence
  Chr17_1 Reverse Primer
ttaaactctgggctgggaaa

SEQ ID NO: 15639 - DNA, 20 bp, Artificial Sequence
  Chr17_1 Reverse Primer
ttccatgggtctctccactc

SEQ ID NO: 15640 - DNA, 20 bp, Artificial Sequence
  Chr17_1 Reverse Primer
cggagaaacttctggagtcg

SEQ ID NO: 15641 - DNA, 20 bp, Artificial Sequence
  Chr17_1 Reverse Primer
ctgtgctctggccacactta

SEQ ID NO: 15642 - DNA, 20 bp, Artificial Sequence
  Chr17_1 Reverse Primer
catcagctcctcattcctcc

SEQ ID NO: 15643 - DNA, 20 bp, Artificial Sequence
  Chr17_1 Reverse Primer
tttaccagccaacctggaag

SEQ ID NO: 15644 - DNA, 20 bp, Artificial Sequence
  Chr17_1 Reverse Primer
tctggacgcagaatgaacag

SEQ ID NO: 15645 - DNA, 20 bp, Artificial Sequence
  Chr17_1 Reverse Primer
tgctcagcaaagaagttcca

SEQ ID NO: 15646 - DNA, 20 bp, Artificial Sequence
  Chr17_1 Reverse Primer
gtgaacgcacacccacaata

SEQ ID NO: 15647 - DNA, 20 bp, Artificial Sequence
  Chr17_1 Reverse Primer
aaacaacagggccaagtgac

SEQ ID NO: 15648 - DNA, 20 bp, Artificial Sequence
  Chr17_1 Reverse Primer
ctcagaagttgggaaggctg

SEQ ID NO: 15649 - DNA, 20 bp, Artificial Sequence
  Chr17_1 Reverse Primer
aagcatccaatgtaggtgcc

SEQ ID NO: 15650 - DNA, 20 bp, Artificial Sequence
  Chr17_1 Reverse Primer
ggtccaattccttaccctga

SEQ ID NO: 15651 - DNA, 21 bp, Artificial Sequence
  Chr17_1 Reverse Primer
cagctaaacgatgtgtggtca

SEQ ID NO: 15652 - DNA, 20 bp, Artificial Sequence
  Chr17_1 Reverse Primer
ctcacaatggtggtcacctg

SEQ ID NO: 15653 - DNA, 20 bp, Artificial Sequence
  Chr17_1 Reverse Primer
ggaagctacatcctgggtga

SEQ ID NO: 15654 - DNA, 20 bp, Artificial Sequence
  Chr17_1 Reverse Primer
atctcccctggctctctagc

SEQ ID NO: 15655 - DNA, 20 bp, Artificial Sequence
  Chr17_1 Reverse Primer
tcaggaccaccacacacact

SEQ ID NO: 15656 - DNA, 20 bp, Artificial Sequence
  Chr17_1 Reverse Primer
gggtcacgctctactcctca

SEQ ID NO: 15657 - DNA, 20 bp, Artificial Sequence
  Chr17_1 Reverse Primer
ctgatgcccaagacatcctt

SEQ ID NO: 15658 - DNA, 20 bp, Artificial Sequence
  Chr17_1 Reverse Primer
tcctcctcatcttctccgtc

SEQ ID NO: 15659 - DNA, 20 bp, Artificial Sequence
  Chr17_1 Reverse Primer
ggcttgttagagaatgggca

SEQ ID NO: 15660 - DNA, 20 bp, Artificial Sequence
  Chr17_1 Reverse Primer
ttctgagaaacctggatgcc

SEQ ID NO: 15661 - DNA, 20 bp, Artificial Sequence
  Chr17_1 Reverse Primer
cagacatccccagattcacc

SEQ ID NO: 15662 - DNA, 20 bp, Artificial Sequence
  Chr17_1 Reverse Primer
cactcttggatctccccaaa

SEQ ID NO: 15663 - DNA, 20 bp, Artificial Sequence
  Chr17_1 Reverse Primer
agctgggagaacaaacctca

SEQ ID NO: 15664 - DNA, 20 bp, Artificial Sequence
  Chr17_1 Reverse Primer
tctcaaggctcacaaaaccc

SEQ ID NO: 15665 - DNA, 20 bp, Artificial Sequence
  Chr17_1 Reverse Primer
gtgcccacaaagtcactgaa

SEQ ID NO: 15666 - DNA, 20 bp, Artificial Sequence
  Chr17_1 Reverse Primer
tggaggttagctctgccagt

SEQ ID NO: 15667 - DNA, 20 bp, Artificial Sequence
  Chr17_1 Reverse Primer
gcaaggtcatgactcagcaa

SEQ ID NO: 15668 - DNA, 20 bp, Artificial Sequence
  Chr17_1 Reverse Primer
ttctcgcaccctaccctatg

SEQ ID NO: 15669 - DNA, 20 bp, Artificial Sequence
  Chr17_1 Reverse Primer
ctatggaaagcgagagctgg

SEQ ID NO: 15670 - DNA, 20 bp, Artificial Sequence
  Chr17_1 Reverse Primer
atctttggagggagtcaggg

SEQ ID NO: 15671 - DNA, 20 bp, Artificial Sequence
  Chr17_1 Reverse Primer
cccacctctcccacatgtat

SEQ ID NO: 15672 - DNA, 20 bp, Artificial Sequence
  Chr17_1 Reverse Primer
aagagagctggcatcctgaa

SEQ ID NO: 15673 - DNA, 20 bp, Artificial Sequence
  Chr17_1 Reverse Primer
gatccacgtgtcacaccact

SEQ ID NO: 15674 - DNA, 20 bp, Artificial Sequence
  Chr17_1 Reverse Primer
ccaggggagacaaagatcaa

SEQ ID NO: 15675 - DNA, 20 bp, Artificial Sequence
  Chr17_1 Reverse Primer
atgactggcatctccaaacc

SEQ ID NO: 15676 - DNA, 20 bp, Artificial Sequence
  Chr17_1 Reverse Primer
ctgggatctcattcttccca

SEQ ID NO: 15677 - DNA, 20 bp, Artificial Sequence
  Chr17_1 Reverse Primer
attgaggctaggctgagcaa

SEQ ID NO: 15678 - DNA, 20 bp, Artificial Sequence
  Chr17_1 Reverse Primer
aatagatgggggaaccaagg

SEQ ID NO: 15679 - DNA, 20 bp, Artificial Sequence
  Chr17_2 Forward Primer
ctcgtaaattatggccgcat

SEQ ID NO: 15680 - DNA, 20 bp, Artificial Sequence
  Chr17_2 Forward Primer
tgtggatggatgcaatttgt

SEQ ID NO: 15681 - DNA, 20 bp, Artificial Sequence
  Chr17_2 Forward Primer
tggctgtcttctggtctgtg

SEQ ID NO: 15682 - DNA, 25 bp, Artificial Sequence
  Chr17_2 Forward Primer
ttccataatgaaaagttgttgtttg

SEQ ID NO: 15683 - DNA, 24 bp, Artificial Sequence
  Chr17_2 Forward Primer
tcaggtttgagaccataatttcag

SEQ ID NO: 15684 - DNA, 21 bp, Artificial Sequence
  Chr17_2 Forward Primer
catgcaacatggcataaagtg

SEQ ID NO: 15685 - DNA, 22 bp, Artificial Sequence
  Chr17_2 Forward Primer
aattacatttgctcagggacaa

SEQ ID NO: 15686 - DNA, 26 bp, Artificial Sequence
  Chr17_2 Forward Primer
tgactaaaagccaaatttagatacaa

SEQ ID NO: 15687 - DNA, 21 bp, Artificial Sequence
  Chr17_2 Forward Primer
cactttagcttcctcaaacgc

SEQ ID NO: 15688 - DNA, 21 bp, Artificial Sequence
  Chr17_2 Forward Primer
ggaaaagggtcatagaatggc

SEQ ID NO: 15689 - DNA, 20 bp, Artificial Sequence
  Chr17_2 Forward Primer
tctggaatgggaagaattgc

SEQ ID NO: 15690 - DNA, 20 bp, Artificial Sequence
  Chr17_2 Forward Primer
tttggttgtcacagtcaccc

SEQ ID NO: 15691 - DNA, 21 bp, Artificial Sequence
  Chr17_2 Forward Primer
tgatgaatagacacaggggct

SEQ ID NO: 15692 - DNA, 20 bp, Artificial Sequence
  Chr17_2 Forward Primer
gttggtttttgcagcagctt

SEQ ID NO: 15693 - DNA, 20 bp, Artificial Sequence
  Chr17_2 Forward Primer
caccccaccatatttgttcc

SEQ ID NO: 15694 - DNA, 20 bp, Artificial Sequence
  Chr17_2 Forward Primer
tgtggagggacttgaagtga

SEQ ID NO: 15695 - DNA, 20 bp, Artificial Sequence
  Chr17_2 Forward Primer
ccatggaaagttctggaagc

SEQ ID NO: 15696 - DNA, 20 bp, Artificial Sequence
  Chr17_2 Forward Primer
atggtcaccagaactttggg

SEQ ID NO: 15697 - DNA, 20 bp, Artificial Sequence
  Chr17_2 Forward Primer
ttttcttggccacatcttcc

SEQ ID NO: 15698 - DNA, 20 bp, Artificial Sequence
  Chr17_2 Forward Primer
aaggtcccagggcagtaaat

SEQ ID NO: 15699 - DNA, 20 bp, Artificial Sequence
  Chr17_2 Forward Primer
ttagtgggtagcagcagcct

SEQ ID NO: 15700 - DNA, 22 bp, Artificial Sequence
  Chr17_2 Forward Primer
tgctgttgatggaactgatatg

SEQ ID NO: 15701 - DNA, 26 bp, Artificial Sequence
  Chr17_2 Forward Primer
agaagtatacctttatttttgttggg

SEQ ID NO: 15702 - DNA, 20 bp, Artificial Sequence
  Chr17_2 Forward Primer
cccctcaagaaaagttgcac

SEQ ID NO: 15703 - DNA, 22 bp, Artificial Sequence
  Chr17_2 Forward Primer
gccttctcttctgtgtttgtct

SEQ ID NO: 15704 - DNA, 20 bp, Artificial Sequence
  Chr17_2 Forward Primer
ataaggtgcaggtggctgac

SEQ ID NO: 15705 - DNA, 20 bp, Artificial Sequence
  Chr17_2 Forward Primer
gtggggcattttgtctgttt

SEQ ID NO: 15706 - DNA, 20 bp, Artificial Sequence
  Chr17_2 Forward Primer
gtccagcctcttctctggtg

SEQ ID NO: 15707 - DNA, 20 bp, Artificial Sequence
  Chr17_2 Forward Primer
tgacaaagggactttctggg

SEQ ID NO: 15708 - DNA, 20 bp, Artificial Sequence
  Chr17_2 Forward Primer
ttcagttggtttctgtgggg

SEQ ID NO: 15709 - DNA, 20 bp, Artificial Sequence
  Chr17_2 Forward Primer
ggtgcttaaggatgttgcca

SEQ ID NO: 15710 - DNA, 20 bp, Artificial Sequence
  Chr17_2 Forward Primer
gtctcattggccaggagtgt

SEQ ID NO: 15711 - DNA, 20 bp, Artificial Sequence
  Chr17_2 Forward Primer
gatctggcagcagtttctcc

SEQ ID NO: 15712 - DNA, 20 bp, Artificial Sequence
  Chr17_2 Forward Primer
gctttgccttcttgctcagt

SEQ ID NO: 15713 - DNA, 20 bp, Artificial Sequence
  Chr17_2 Forward Primer
gccttgcttcccattactca

SEQ ID NO: 15714 - DNA, 21 bp, Artificial Sequence
  Chr17_2 Forward Primer
gcagagatgcatttttgttca

SEQ ID NO: 15715 - DNA, 20 bp, Artificial Sequence
  Chr17_2 Forward Primer
cctcacctgctgaatcactg

SEQ ID NO: 15716 - DNA, 22 bp, Artificial Sequence
  Chr17_2 Forward Primer
ttcccaaaggaaaagaaaacaa

SEQ ID NO: 15717 - DNA, 21 bp, Artificial Sequence
  Chr17_2 Forward Primer
cggaacgatacttgaaatgga

SEQ ID NO: 15718 - DNA, 20 bp, Artificial Sequence
  Chr17_2 Forward Primer
tgtcaaccaaatgcttcctg

SEQ ID NO: 15719 - DNA, 22 bp, Artificial Sequence
  Chr17_2 Forward Primer
aaaggaagatgtagctgaccca

SEQ ID NO: 15720 - DNA, 22 bp, Artificial Sequence
  Chr17_2 Forward Primer
tcctgttttcttaccatgtccc

SEQ ID NO: 15721 - DNA, 23 bp, Artificial Sequence
  Chr17_2 Forward Primer
agcatacagagtgtggtgtgaag

SEQ ID NO: 15722 - DNA, 20 bp, Artificial Sequence
  Chr17_2 Forward Primer
gacaggagcctggaagtcaa

SEQ ID NO: 15723 - DNA, 20 bp, Artificial Sequence
  Chr17_2 Forward Primer
ccatctttagtgagggctgc

SEQ ID NO: 15724 - DNA, 21 bp, Artificial Sequence
  Chr17_2 Forward Primer
gggcagaatacgagattacca

SEQ ID NO: 15725 - DNA, 20 bp, Artificial Sequence
  Chr17_2 Forward Primer
ccctcaaattctcccattga

SEQ ID NO: 15726 - DNA, 20 bp, Artificial Sequence
  Chr17_2 Forward Primer
tatatgggccagaacaggct

SEQ ID NO: 15727 - DNA, 20 bp, Artificial Sequence
  Chr17_2 Forward Primer
tgcatgtctctcgtttctgg

SEQ ID NO: 15728 - DNA, 20 bp, Artificial Sequence
  Chr17_2 Forward Primer
atgccaatagtggtgccttc

SEQ ID NO: 15729 - DNA, 20 bp, Artificial Sequence
  Chr17_2 Forward Primer
agagcttcatgcctctccag

SEQ ID NO: 15730 - DNA, 20 bp, Artificial Sequence
  Chr17_2 Forward Primer
ctctcccagttaccaggtcc

SEQ ID NO: 15731 - DNA, 20 bp, Artificial Sequence
  Chr17_2 Forward Primer
tctgcagtctgacatttgcc

SEQ ID NO: 15732 - DNA, 20 bp, Artificial Sequence
  Chr17_2 Forward Primer
aggtcttcccttcccttgtg

SEQ ID NO: 15733 - DNA, 20 bp, Artificial Sequence
  Chr17_2 Forward Primer
cagcttctgtaaaccccagg

SEQ ID NO: 15734 - DNA, 20 bp, Artificial Sequence
  Chr17_2 Reverse Primer
actccagaggtcatttcccc

SEQ ID NO: 15735 - DNA, 20 bp, Artificial Sequence
  Chr17_2 Reverse Primer
tcaccagatggtgcagagag

SEQ ID NO: 15736 - DNA, 20 bp, Artificial Sequence
  Chr17_2 Reverse Primer
agtaccatgagcccccatta

SEQ ID NO: 15737 - DNA, 20 bp, Artificial Sequence
  Chr17_2 Reverse Primer
gaaggatgcatgctggaaaa

SEQ ID NO: 15738 - DNA, 22 bp, Artificial Sequence
  Chr17_2 Reverse Primer
ttgatggcaagaattctccttt

SEQ ID NO: 15739 - DNA, 20 bp, Artificial Sequence
  Chr17_2 Reverse Primer
tcccagaggcaacagttttc

SEQ ID NO: 15740 - DNA, 20 bp, Artificial Sequence
  Chr17_2 Reverse Primer
gccttggtcctcctcctact

SEQ ID NO: 15741 - DNA, 21 bp, Artificial Sequence
  Chr17_2 Reverse Primer
cccgttcagtcaatttttcaa

SEQ ID NO: 15742 - DNA, 24 bp, Artificial Sequence
  Chr17_2 Reverse Primer
tctggtttcggttaagaataatca

SEQ ID NO: 15743 - DNA, 20 bp, Artificial Sequence
  Chr17_2 Reverse Primer
gacccccaacttaaaaagcc

SEQ ID NO: 15744 - DNA, 20 bp, Artificial Sequence
  Chr17_2 Reverse Primer
caatttggcacaggatgcta

SEQ ID NO: 15745 - DNA, 20 bp, Artificial Sequence
  Chr17_2 Reverse Primer
caaagaggcctggcttactc

SEQ ID NO: 15746 - DNA, 20 bp, Artificial Sequence
  Chr17_2 Reverse Primer
catgacactcaggccacttg

SEQ ID NO: 15747 - DNA, 22 bp, Artificial Sequence
  Chr17_2 Reverse Primer
ggaacagtttgatcattccagg

SEQ ID NO: 15748 - DNA, 20 bp, Artificial Sequence
  Chr17_2 Reverse Primer
aggaactgcccaaagtctca

SEQ ID NO: 15749 - DNA, 20 bp, Artificial Sequence
  Chr17_2 Reverse Primer
tgacaacatgaccactgcct

SEQ ID NO: 15750 - DNA, 20 bp, Artificial Sequence
  Chr17_2 Reverse Primer
gaaggcgacatttcacacag

SEQ ID NO: 15751 - DNA, 20 bp, Artificial Sequence
  Chr17_2 Reverse Primer
aatgactctcacgagccagg

SEQ ID NO: 15752 - DNA, 20 bp, Artificial Sequence
  Chr17_2 Reverse Primer
tgacatttggaagccaatga

SEQ ID NO: 15753 - DNA, 20 bp, Artificial Sequence
  Chr17_2 Reverse Primer
cctgctgactccaaaacaca

SEQ ID NO: 15754 - DNA, 20 bp, Artificial Sequence
  Chr17_2 Reverse Primer
tgtggtccatgcaacaaact

SEQ ID NO: 15755 - DNA, 20 bp, Artificial Sequence
  Chr17_2 Reverse Primer
cagtgaatgctaaaaccccc

SEQ ID NO: 15756 - DNA, 20 bp, Artificial Sequence
  Chr17_2 Reverse Primer
aaccatgcgtacctgttgct

SEQ ID NO: 15757 - DNA, 20 bp, Artificial Sequence
  Chr17_2 Reverse Primer
acatgccatcaacaaagcaa

SEQ ID NO: 15758 - DNA, 22 bp, Artificial Sequence
  Chr17_2 Reverse Primer
ttcatgtgggaaagtctaagca

SEQ ID NO: 15759 - DNA, 20 bp, Artificial Sequence
  Chr17_2 Reverse Primer
tttccggaagggagaaagat

SEQ ID NO: 15760 - DNA, 20 bp, Artificial Sequence
  Chr17_2 Reverse Primer
ggccacagaactgctaaacc

SEQ ID NO: 15761 - DNA, 20 bp, Artificial Sequence
  Chr17_2 Reverse Primer
gctagagggactgaaagggg

SEQ ID NO: 15762 - DNA, 22 bp, Artificial Sequence
  Chr17_2 Reverse Primer
gaggactgggtcactacattca

SEQ ID NO: 15763 - DNA, 20 bp, Artificial Sequence
  Chr17_2 Reverse Primer
ttcccctggcatctaccata

SEQ ID NO: 15764 - DNA, 20 bp, Artificial Sequence
  Chr17_2 Reverse Primer
tcaagaactttccctcccaa

SEQ ID NO: 15765 - DNA, 20 bp, Artificial Sequence
  Chr17_2 Reverse Primer
gcttcatgtcctcctccaag

SEQ ID NO: 15766 - DNA, 21 bp, Artificial Sequence
  Chr17_2 Reverse Primer
tcactaacagctttgccacct

SEQ ID NO: 15767 - DNA, 21 bp, Artificial Sequence
  Chr17_2 Reverse Primer
caaagtatgctatggggacca

SEQ ID NO: 15768 - DNA, 20 bp, Artificial Sequence
  Chr17_2 Reverse Primer
ggagatctgcttggacttgc

SEQ ID NO: 15769 - DNA, 20 bp, Artificial Sequence
  Chr17_2 Reverse Primer
caaacccagaagacttccca

SEQ ID NO: 15770 - DNA, 20 bp, Artificial Sequence
  Chr17_2 Reverse Primer
tggcaagctagttcgctaca

SEQ ID NO: 15771 - DNA, 21 bp, Artificial Sequence
  Chr17_2 Reverse Primer
agcgtttagctacctgtgctt

SEQ ID NO: 15772 - DNA, 24 bp, Artificial Sequence
  Chr17_2 Reverse Primer
ggtgcctataaactgttgaacaaa

SEQ ID NO: 15773 - DNA, 20 bp, Artificial Sequence
  Chr17_2 Reverse Primer
caccacagccacaaaggtaa

SEQ ID NO: 15774 - DNA, 20 bp, Artificial Sequence
  Chr17_2 Reverse Primer
gcagcagagaaccacttgaa

SEQ ID NO: 15775 - DNA, 21 bp, Artificial Sequence
  Chr17_2 Reverse Primer
atctctctgtctcctccaggg

SEQ ID NO: 15776 - DNA, 25 bp, Artificial Sequence
  Chr17_2 Reverse Primer
tctgactatatcaaatgcactgagc

SEQ ID NO: 15777 - DNA, 20 bp, Artificial Sequence
  Chr17_2 Reverse Primer
ttcgacagttccttctccaa

SEQ ID NO: 15778 - DNA, 20 bp, Artificial Sequence
  Chr17_2 Reverse Primer
atgttgccaatgaagcatga

SEQ ID NO: 15779 - DNA, 20 bp, Artificial Sequence
  Chr17_2 Reverse Primer
aggcagtgaggacggataaa

SEQ ID NO: 15780 - DNA, 20 bp, Artificial Sequence
  Chr17_2 Reverse Primer
attgcaaaacctcctggaca

SEQ ID NO: 15781 - DNA, 20 bp, Artificial Sequence
  Chr17_2 Reverse Primer
ggtgcaggttcggataaaga

SEQ ID NO: 15782 - DNA, 20 bp, Artificial Sequence
  Chr17_2 Reverse Primer
tgggtcacggatttcttgat

SEQ ID NO: 15783 - DNA, 20 bp, Artificial Sequence
  Chr17_2 Reverse Primer
cctgagggaatgcatgagat

SEQ ID NO: 15784 - DNA, 20 bp, Artificial Sequence
  Chr17_2 Reverse Primer
tttaccatgcacttgggtga

SEQ ID NO: 15785 - DNA, 20 bp, Artificial Sequence
  Chr17_2 Reverse Primer
tgtagtttggttggttggca

SEQ ID NO: 15786 - DNA, 20 bp, Artificial Sequence
  Chr17_2 Reverse Primer
ccagttactccctcgctcac

SEQ ID NO: 15787 - DNA, 20 bp, Artificial Sequence
  Chr17_2 Reverse Primer
gtgtccaagagtggtgctga

SEQ ID NO: 15788 - DNA, 20 bp, Artificial Sequence
  Chr17_2 Reverse Primer
tgacaaactgcagacaagcc

SEQ ID NO: 15789 - DNA, 20 bp, Artificial Sequence
  Chr17_3 Forward Primer
gggagggtgttttcttcctc

SEQ ID NO: 15790 - DNA, 20 bp, Artificial Sequence
  Chr17_3 Forward Primer
gtctgtgcctcggttttgat

SEQ ID NO: 15791 - DNA, 20 bp, Artificial Sequence
  Chr17_3 Forward Primer
gttcgagccctgcaataaag

SEQ ID NO: 15792 - DNA, 20 bp, Artificial Sequence
  Chr17_3 Forward Primer
gtctgcccctcagttctctg

SEQ ID NO: 15793 - DNA, 20 bp, Artificial Sequence
  Chr17_3 Forward Primer
ggggctccaagtcctctatc

SEQ ID NO: 15794 - DNA, 20 bp, Artificial Sequence
  Chr17_3 Forward Primer
tggaggggtattgcctaaaa

SEQ ID NO: 15795 - DNA, 20 bp, Artificial Sequence
  Chr17_3 Forward Primer
gctactggtacacacggtgc

SEQ ID NO: 15796 - DNA, 20 bp, Artificial Sequence
  Chr17_3 Forward Primer
agagagctggcctgaaactg

SEQ ID NO: 15797 - DNA, 20 bp, Artificial Sequence
  Chr17_3 Forward Primer
attccacagacacacccctc

SEQ ID NO: 15798 - DNA, 20 bp, Artificial Sequence
  Chr17_3 Forward Primer
atctgtgaagtgggactggc

SEQ ID NO: 15799 - DNA, 20 bp, Artificial Sequence
  Chr17_3 Forward Primer
cctcctgtttcctggtgtgt

SEQ ID NO: 15800 - DNA, 20 bp, Artificial Sequence
  Chr17_3 Forward Primer
gtcctctagcacttggcctg

SEQ ID NO: 15801 - DNA, 20 bp, Artificial Sequence
  Chr17_3 Forward Primer
gcccagttaagcattccaga

SEQ ID NO: 15802 - DNA, 20 bp, Artificial Sequence
  Chr17_3 Forward Primer
ctcagaaaagacagggctgg

SEQ ID NO: 15803 - DNA, 20 bp, Artificial Sequence
  Chr17_3 Forward Primer
aagggagcatgtggagactg

SEQ ID NO: 15804 - DNA, 20 bp, Artificial Sequence
  Chr17_3 Forward Primer
tcaaaagtggggcttctgac

SEQ ID NO: 15805 - DNA, 20 bp, Artificial Sequence
  Chr17_3 Forward Primer
gcttctgggtttctcagtgc

SEQ ID NO: 15806 - DNA, 20 bp, Artificial Sequence
  Chr17_3 Forward Primer
ggcctccttgatccctattc

SEQ ID NO: 15807 - DNA, 20 bp, Artificial Sequence
  Chr17_3 Forward Primer
cagagtctgtgtgcactggg

SEQ ID NO: 15808 - DNA, 20 bp, Artificial Sequence
  Chr17_3 Forward Primer
ctgtcatcctcctgggtctc

SEQ ID NO: 15809 - DNA, 20 bp, Artificial Sequence
  Chr17_3 Forward Primer
gggattgctataatgcccct

SEQ ID NO: 15810 - DNA, 20 bp, Artificial Sequence
  Chr17_3 Forward Primer
agccagatttgaaccccaat

SEQ ID NO: 15811 - DNA, 20 bp, Artificial Sequence
  Chr17_3 Forward Primer
ggagccaaatttaccccatt

SEQ ID NO: 15812 - DNA, 20 bp, Artificial Sequence
  Chr17_3 Forward Primer
taagaggacaagccattgcc

SEQ ID NO: 15813 - DNA, 20 bp, Artificial Sequence
  Chr17_3 Forward Primer
taaagggcatgaaccctgag

SEQ ID NO: 15814 - DNA, 20 bp, Artificial Sequence
  Chr17_3 Forward Primer
atgatggactgtcacccctc

SEQ ID NO: 15815 - DNA, 20 bp, Artificial Sequence
  Chr17_3 Forward Primer
ctagaggtgaaatggctggg

SEQ ID NO: 15816 - DNA, 20 bp, Artificial Sequence
  Chr17_3 Forward Primer
caagtgtggggtcatgtctg

SEQ ID NO: 15817 - DNA, 20 bp, Artificial Sequence
  Chr17_3 Forward Primer
ggtcacataggcagagcctt

SEQ ID NO: 15818 - DNA, 20 bp, Artificial Sequence
  Chr17_3 Forward Primer
cacttaggaccagcaggagc

SEQ ID NO: 15819 - DNA, 20 bp, Artificial Sequence
  Chr17_3 Forward Primer
gctggccatttatccagcta

SEQ ID NO: 15820 - DNA, 20 bp, Artificial Sequence
  Chr17_3 Forward Primer
ccaagcatggctctaagctc

SEQ ID NO: 15821 - DNA, 20 bp, Artificial Sequence
  Chr17_3 Forward Primer
ctcgagaacttgctgaggct

SEQ ID NO: 15822 - DNA, 20 bp, Artificial Sequence
  Chr17_3 Forward Primer
cccgtgcactcttgtctgat

SEQ ID NO: 15823 - DNA, 20 bp, Artificial Sequence
  Chr17_3 Forward Primer
tgctggggataactctgagg

SEQ ID NO: 15824 - DNA, 20 bp, Artificial Sequence
  Chr17_3 Forward Primer
gagctgtggtgtgagagcag

SEQ ID NO: 15825 - DNA, 20 bp, Artificial Sequence
  Chr17_3 Forward Primer
tctcctagagacaccagggc

SEQ ID NO: 15826 - DNA, 20 bp, Artificial Sequence
  Chr17_3 Forward Primer
ccagtttactggggttggaa

SEQ ID NO: 15827 - DNA, 20 bp, Artificial Sequence
  Chr17_3 Forward Primer
tgtccccttcagagctcatt

SEQ ID NO: 15828 - DNA, 20 bp, Artificial Sequence
  Chr17_3 Forward Primer
tttatggaatgaacggggaa

SEQ ID NO: 15829 - DNA, 20 bp, Artificial Sequence
  Chr17_3 Forward Primer
tgcttatgagcgccctaact

SEQ ID NO: 15830 - DNA, 20 bp, Artificial Sequence
  Chr17_3 Forward Primer
ggcacagggacagaatccta

SEQ ID NO: 15831 - DNA, 20 bp, Artificial Sequence
  Chr17_3 Forward Primer
gcagtcttccctgacctctg

SEQ ID NO: 15832 - DNA, 20 bp, Artificial Sequence
  Chr17_3 Forward Primer
cagagcgataggctttctgg

SEQ ID NO: 15833 - DNA, 20 bp, Artificial Sequence
  Chr17_3 Forward Primer
gtggctggattacagaggga

SEQ ID NO: 15834 - DNA, 20 bp, Artificial Sequence
  Chr17_3 Forward Primer
tcctttgagcttggaggatg

SEQ ID NO: 15835 - DNA, 20 bp, Artificial Sequence
  Chr17_3 Forward Primer
cattgcctttgggatcaagt

SEQ ID NO: 15836 - DNA, 20 bp, Artificial Sequence
  Chr17_3 Forward Primer
cctaggacttaacggagccc

SEQ ID NO: 15837 - DNA, 20 bp, Artificial Sequence
  Chr17_3 Forward Primer
ggaatgtgaggggtcagtgt

SEQ ID NO: 15838 - DNA, 20 bp, Artificial Sequence
  Chr17_3 Forward Primer
ttttgcagatggggagtttc

SEQ ID NO: 15839 - DNA, 20 bp, Artificial Sequence
  Chr17_3 Forward Primer
gaagcatttgtgggacttgg

SEQ ID NO: 15840 - DNA, 20 bp, Artificial Sequence
  Chr17_3 Forward Primer
gagggcctgaattcctttgt

SEQ ID NO: 15841 - DNA, 20 bp, Artificial Sequence
  Chr17_3 Forward Primer
acagttactgctggggcact

SEQ ID NO: 15842 - DNA, 20 bp, Artificial Sequence
  Chr17_3 Forward Primer
cctaggatatcagtggggca

SEQ ID NO: 15843 - DNA, 20 bp, Artificial Sequence
  Chr17_3 Forward Primer
cagcctagccttgatgtggt

SEQ ID NO: 15844 - DNA, 20 bp, Artificial Sequence
  Chr17_3 Forward Primer
gcctcaggtcttggtgttgt

SEQ ID NO: 15845 - DNA, 20 bp, Artificial Sequence
  Chr17_3 Reverse Primer
agtgcaaaccagtcagaggg

SEQ ID NO: 15846 - DNA, 20 bp, Artificial Sequence
  Chr17_3 Reverse Primer
cgcggtactctaagatggga

SEQ ID NO: 15847 - DNA, 20 bp, Artificial Sequence
  Chr17_3 Reverse Primer
gctctcctttggcatctcag

SEQ ID NO: 15848 - DNA, 20 bp, Artificial Sequence
  Chr17_3 Reverse Primer
cagtggagaagaggggtgtc

SEQ ID NO: 15849 - DNA, 20 bp, Artificial Sequence
  Chr17_3 Reverse Primer
gttgaggcacattcctggag

SEQ ID NO: 15850 - DNA, 20 bp, Artificial Sequence
  Chr17_3 Reverse Primer
tgctgctgctgttactcctg

SEQ ID NO: 15851 - DNA, 20 bp, Artificial Sequence
  Chr17_3 Reverse Primer
cctgactctcctccacgcta

SEQ ID NO: 15852 - DNA, 20 bp, Artificial Sequence
  Chr17_3 Reverse Primer
ctaatgccaccctctgcact

SEQ ID NO: 15853 - DNA, 20 bp, Artificial Sequence
  Chr17_3 Reverse Primer
tggaagaagcagtccagaca

SEQ ID NO: 15854 - DNA, 20 bp, Artificial Sequence
  Chr17_3 Reverse Primer
acatgtccaagggaaggttg

SEQ ID NO: 15855 - DNA, 20 bp, Artificial Sequence
  Chr17_3 Reverse Primer
actcctatctggccaagcaa

SEQ ID NO: 15856 - DNA, 20 bp, Artificial Sequence
  Chr17_3 Reverse Primer
agagacactgtcccctccct

SEQ ID NO: 15857 - DNA, 20 bp, Artificial Sequence
  Chr17_3 Reverse Primer
ctcaggcaagcagaaagcat

SEQ ID NO: 15858 - DNA, 20 bp, Artificial Sequence
  Chr17_3 Reverse Primer
ggagggctgagaagtatccc

SEQ ID NO: 15859 - DNA, 20 bp, Artificial Sequence
  Chr17_3 Reverse Primer
ctgctggcagcgatttattt

SEQ ID NO: 15860 - DNA, 20 bp, Artificial Sequence
  Chr17_3 Reverse Primer
caaagctcaccacgcaaata

SEQ ID NO: 15861 - DNA, 20 bp, Artificial Sequence
  Chr17_3 Reverse Primer
aagactcagccctcaatcca

SEQ ID NO: 15862 - DNA, 20 bp, Artificial Sequence
  Chr17_3 Reverse Primer
tcctctgttacacaaccccc

SEQ ID NO: 15863 - DNA, 20 bp, Artificial Sequence
  Chr17_3 Reverse Primer
gtcaggaaaacaccctccct

SEQ ID NO: 15864 - DNA, 20 bp, Artificial Sequence
  Chr17_3 Reverse Primer
agggactagggtgtggcaag

SEQ ID NO: 15865 - DNA, 20 bp, Artificial Sequence
  Chr17_3 Reverse Primer
attattgttttggggtgcca

SEQ ID NO: 15866 - DNA, 20 bp, Artificial Sequence
  Chr17_3 Reverse Primer
caagtcacacagcagatggg

SEQ ID NO: 15867 - DNA, 20 bp, Artificial Sequence
  Chr17_3 Reverse Primer
caagaaagaggtgcctggac

SEQ ID NO: 15868 - DNA, 20 bp, Artificial Sequence
  Chr17_3 Reverse Primer
caccacaaactgcggtatca

SEQ ID NO: 15869 - DNA, 20 bp, Artificial Sequence
  Chr17_3 Reverse Primer
ttgagggagaaagccaagaa

SEQ ID NO: 15870 - DNA, 20 bp, Artificial Sequence
  Chr17_3 Reverse Primer
gggcaggactttgttttgtg

SEQ ID NO: 15871 - DNA, 20 bp, Artificial Sequence
  Chr17_3 Reverse Primer
gtttccaaagcatcacaggg

SEQ ID NO: 15872 - DNA, 20 bp, Artificial Sequence
  Chr17_3 Reverse Primer
agctcaggagagagggaagg

SEQ ID NO: 15873 - DNA, 20 bp, Artificial Sequence
  Chr17_3 Reverse Primer
ctctgagcaaacacagccag

SEQ ID NO: 15874 - DNA, 20 bp, Artificial Sequence
  Chr17_3 Reverse Primer
catggaccacaaatgtctgc

SEQ ID NO: 15875 - DNA, 20 bp, Artificial Sequence
  Chr17_3 Reverse Primer
gccatgaggggactaagtga

SEQ ID NO: 15876 - DNA, 20 bp, Artificial Sequence
  Chr17_3 Reverse Primer
cctcagctgaaccccaaata

SEQ ID NO: 15877 - DNA, 20 bp, Artificial Sequence
  Chr17_3 Reverse Primer
ctgtggtggtcatcaacgtc

SEQ ID NO: 15878 - DNA, 20 bp, Artificial Sequence
  Chr17_3 Reverse Primer
acactaattgcacacgctgc

SEQ ID NO: 15879 - DNA, 20 bp, Artificial Sequence
  Chr17_3 Reverse Primer
gtcctttccccagaaacaga

SEQ ID NO: 15880 - DNA, 20 bp, Artificial Sequence
  Chr17_3 Reverse Primer
cacccctaaggcacacattt

SEQ ID NO: 15881 - DNA, 20 bp, Artificial Sequence
  Chr17_3 Reverse Primer
ctgtgacacatgccacttcc

SEQ ID NO: 15882 - DNA, 20 bp, Artificial Sequence
  Chr17_3 Reverse Primer
aagcactggctgcacttttt

SEQ ID NO: 15883 - DNA, 20 bp, Artificial Sequence
  Chr17_3 Reverse Primer
agatcgggggagacagacat

SEQ ID NO: 15884 - DNA, 20 bp, Artificial Sequence
  Chr17_3 Reverse Primer
tgggttctctcttgcactca

SEQ ID NO: 15885 - DNA, 20 bp, Artificial Sequence
  Chr17_3 Reverse Primer
gtgaacttgatgggggaaaa

SEQ ID NO: 15886 - DNA, 20 bp, Artificial Sequence
  Chr17_3 Reverse Primer
atccttcaacacccctttcc

SEQ ID NO: 15887 - DNA, 20 bp, Artificial Sequence
  Chr17_3 Reverse Primer
ctgctgccagaatcacactc

SEQ ID NO: 15888 - DNA, 20 bp, Artificial Sequence
  Chr17_3 Reverse Primer
tctctgtaggggagcacgtt

SEQ ID NO: 15889 - DNA, 20 bp, Artificial Sequence
  Chr17_3 Reverse Primer
tagcatgtttcttgagcccc

SEQ ID NO: 15890 - DNA, 20 bp, Artificial Sequence
  Chr17_3 Reverse Primer
aaatcggacccatgtgctta

SEQ ID NO: 15891 - DNA, 20 bp, Artificial Sequence
  Chr17_3 Reverse Primer
ctactccacagaagccctgc

SEQ ID NO: 15892 - DNA, 20 bp, Artificial Sequence
  Chr17_3 Reverse Primer
cagtcacaccaaacaccagg

SEQ ID NO: 15893 - DNA, 20 bp, Artificial Sequence
  Chr17_3 Reverse Primer
agaaacaggcttcccaacag

SEQ ID NO: 15894 - DNA, 20 bp, Artificial Sequence
  Chr17_3 Reverse Primer
gaggctcagcttcctctgaa

SEQ ID NO: 15895 - DNA, 21 bp, Artificial Sequence
  Chr17_3 Reverse Primer
ggaggaaggcaaaattagctc

SEQ ID NO: 15896 - DNA, 20 bp, Artificial Sequence
  Chr17_3 Reverse Primer
agcagaacaagatggggtgt

SEQ ID NO: 15897 - DNA, 20 bp, Artificial Sequence
  Chr17_3 Reverse Primer
gtgtctctctgcccaaaagc

SEQ ID NO: 15898 - DNA, 20 bp, Artificial Sequence
  Chr17_3 Reverse Primer
acctcttacacccaatcccc

SEQ ID NO: 15899 - DNA, 20 bp, Artificial Sequence
  Chr17_3 Reverse Primer
tcctaatccaggcaccattc

SEQ ID NO: 15900 - DNA, 20 bp, Artificial Sequence
  Chr17_3 Reverse Primer
actacctgccacgtgctctt

SEQ ID NO: 15901 - DNA, 20 bp, Artificial Sequence
  Chr17_4 Forward Primer
gtctgcacatccacccttgt

SEQ ID NO: 15902 - DNA, 20 bp, Artificial Sequence
  Chr17_4 Forward Primer
ttgttaacagggctggaagc

SEQ ID NO: 15903 - DNA, 20 bp, Artificial Sequence
  Chr17_4 Forward Primer
ggcatttcagaacatgggag

SEQ ID NO: 15904 - DNA, 20 bp, Artificial Sequence
  Chr17_4 Forward Primer
atgacccttcttccccaaag

SEQ ID NO: 15905 - DNA, 20 bp, Artificial Sequence
  Chr17_4 Forward Primer
tgccattagaaccttctccc

SEQ ID NO: 15906 - DNA, 20 bp, Artificial Sequence
  Chr17_4 Forward Primer
agcgcctcaatgacacttct

SEQ ID NO: 15907 - DNA, 20 bp, Artificial Sequence
  Chr17_4 Forward Primer
cttggcccttattcccattt

SEQ ID NO: 15908 - DNA, 20 bp, Artificial Sequence
  Chr17_4 Forward Primer
ctgtattgaccgagacccgt

SEQ ID NO: 15909 - DNA, 20 bp, Artificial Sequence
  Chr17_4 Forward Primer
gctcaacatcctgaccctgt

SEQ ID NO: 15910 - DNA, 20 bp, Artificial Sequence
  Chr17_4 Forward Primer
cttccctgtgacatggtcct

SEQ ID NO: 15911 - DNA, 20 bp, Artificial Sequence
  Chr17_4 Forward Primer
aattgctagtgccacttggg

SEQ ID NO: 15912 - DNA, 20 bp, Artificial Sequence
  Chr17_4 Forward Primer
ccagatcagtggttccctgt

SEQ ID NO: 15913 - DNA, 20 bp, Artificial Sequence
  Chr17_4 Forward Primer
tggcctgtcagacactcttg

SEQ ID NO: 15914 - DNA, 20 bp, Artificial Sequence
  Chr17_4 Forward Primer
ccgagggatatcagtgggta

SEQ ID NO: 15915 - DNA, 20 bp, Artificial Sequence
  Chr17_4 Forward Primer
gctgcaccttgcatatgtct

SEQ ID NO: 15916 - DNA, 20 bp, Artificial Sequence
  Chr17_4 Forward Primer
gccatagcttagggtcacca

SEQ ID NO: 15917 - DNA, 20 bp, Artificial Sequence
  Chr17_4 Forward Primer
agtaactggtggagctggga

SEQ ID NO: 15918 - DNA, 21 bp, Artificial Sequence
  Chr17_4 Forward Primer
ttaaaccctcaaaacgacacg

SEQ ID NO: 15919 - DNA, 20 bp, Artificial Sequence
  Chr17_4 Forward Primer
actctgcctgggagatgaga

SEQ ID NO: 15920 - DNA, 20 bp, Artificial Sequence
  Chr17_4 Forward Primer
gaaagcctggaggaggagtc

SEQ ID NO: 15921 - DNA, 20 bp, Artificial Sequence
  Chr17_4 Forward Primer
cccagcctgtcataccttgt

SEQ ID NO: 15922 - DNA, 20 bp, Artificial Sequence
  Chr17_4 Forward Primer
gcagaaaaaccaagtcccag

SEQ ID NO: 15923 - DNA, 21 bp, Artificial Sequence
  Chr17_4 Forward Primer
ccgactgggtgagtaaacaaa

SEQ ID NO: 15924 - DNA, 20 bp, Artificial Sequence
  Chr17_4 Forward Primer
gatcccagctaagtccctga

SEQ ID NO: 15925 - DNA, 20 bp, Artificial Sequence
  Chr17_4 Forward Primer
ggacccaccagaatttctcc

SEQ ID NO: 15926 - DNA, 20 bp, Artificial Sequence
  Chr17_4 Forward Primer
ttggtcaagcaatgtggaaa

SEQ ID NO: 15927 - DNA, 20 bp, Artificial Sequence
  Chr17_4 Forward Primer
gccaccttaatctctgctgc

SEQ ID NO: 15928 - DNA, 20 bp, Artificial Sequence
  Chr17_4 Forward Primer
agaacaagtcgcccttctca

SEQ ID NO: 15929 - DNA, 20 bp, Artificial Sequence
  Chr17_4 Forward Primer
ggcgggatagatgggttaga

SEQ ID NO: 15930 - DNA, 20 bp, Artificial Sequence
  Chr17_4 Forward Primer
gagtgtcttccctcttcccc

SEQ ID NO: 15931 - DNA, 20 bp, Artificial Sequence
  Chr17_4 Forward Primer
ggctgaagagctgtggaaac

SEQ ID NO: 15932 - DNA, 20 bp, Artificial Sequence
  Chr17_4 Forward Primer
ttttatcccagtgggtccct

SEQ ID NO: 15933 - DNA, 20 bp, Artificial Sequence
  Chr17_4 Forward Primer
tgcagatgtcttctcatggc

SEQ ID NO: 15934 - DNA, 20 bp, Artificial Sequence
  Chr17_4 Forward Primer
tggtaccttatcgaagccca

SEQ ID NO: 15935 - DNA, 20 bp, Artificial Sequence
  Chr17_4 Forward Primer
agtctgactgattccgtggg

SEQ ID NO: 15936 - DNA, 20 bp, Artificial Sequence
  Chr17_4 Forward Primer
gacagagctaggggcagttg

SEQ ID NO: 15937 - DNA, 20 bp, Artificial Sequence
  Chr17_4 Forward Primer
ggcctgttccctctctcttt

SEQ ID NO: 15938 - DNA, 21 bp, Artificial Sequence
  Chr17_4 Forward Primer
cctcacaggtgtctcctgact

SEQ ID NO: 15939 - DNA, 20 bp, Artificial Sequence
  Chr17_4 Forward Primer
tcccttctttctgtgatgcc

SEQ ID NO: 15940 - DNA, 20 bp, Artificial Sequence
  Chr17_4 Forward Primer
attcccgtgagtaatggctg

SEQ ID NO: 15941 - DNA, 20 bp, Artificial Sequence
  Chr17_4 Forward Primer
ccagctgtgtgtgcttcagt

SEQ ID NO: 15942 - DNA, 20 bp, Artificial Sequence
  Chr17_4 Forward Primer
gaggaccatctgtggcaaaa

SEQ ID NO: 15943 - DNA, 20 bp, Artificial Sequence
  Chr17_4 Forward Primer
ctgcctcctaggtggacttg

SEQ ID NO: 15944 - DNA, 20 bp, Artificial Sequence
  Chr17_4 Forward Primer
cacctgggcattgctattct

SEQ ID NO: 15945 - DNA, 20 bp, Artificial Sequence
  Chr17_4 Forward Primer
gagtggaaaagcagggtcag

SEQ ID NO: 15946 - DNA, 20 bp, Artificial Sequence
  Chr17_4 Forward Primer
gacgcagtgatgctgaagaa

SEQ ID NO: 15947 - DNA, 20 bp, Artificial Sequence
  Chr17_4 Forward Primer
ggttgtacacaccaagcagc

SEQ ID NO: 15948 - DNA, 20 bp, Artificial Sequence
  Chr17_4 Forward Primer
aaatggtgggatttctgggt

SEQ ID NO: 15949 - DNA, 20 bp, Artificial Sequence
  Chr17_4 Forward Primer
atggctgatactgaccccag

SEQ ID NO: 15950 - DNA, 20 bp, Artificial Sequence
  Chr17_4 Forward Primer
gcagtcacttctggagtccc

SEQ ID NO: 15951 - DNA, 20 bp, Artificial Sequence
  Chr17_4 Forward Primer
cccctcccagttcagtacaa

SEQ ID NO: 15952 - DNA, 20 bp, Artificial Sequence
  Chr17_4 Forward Primer
agtgccttgagctgagttcc

SEQ ID NO: 15953 - DNA, 20 bp, Artificial Sequence
  Chr17_4 Forward Primer
gaaggtgcacaagctgacaa

SEQ ID NO: 15954 - DNA, 20 bp, Artificial Sequence
  Chr17_4 Forward Primer
gagcacgttcttctcaaccc

SEQ ID NO: 15955 - DNA, 20 bp, Artificial Sequence
  Chr17_4 Forward Primer
gttggccagagcctagtgag

SEQ ID NO: 15956 - DNA, 20 bp, Artificial Sequence
  Chr17_4 Forward Primer
gctctgcagatgaggtgtca

SEQ ID NO: 15957 - DNA, 20 bp, Artificial Sequence
  Chr17_4 Reverse Primer
gacacctccttccgtgtctg

SEQ ID NO: 15958 - DNA, 20 bp, Artificial Sequence
  Chr17_4 Reverse Primer
ttggaaacccacttctcagg

SEQ ID NO: 15959 - DNA, 20 bp, Artificial Sequence
  Chr17_4 Reverse Primer
agtggtctttcctgtggtgg

SEQ ID NO: 15960 - DNA, 20 bp, Artificial Sequence
  Chr17_4 Reverse Primer
cccttcccactactgaggct

SEQ ID NO: 15961 - DNA, 20 bp, Artificial Sequence
  Chr17_4 Reverse Primer
tcaggaactggggtatttgg

SEQ ID NO: 15962 - DNA, 20 bp, Artificial Sequence
  Chr17_4 Reverse Primer
tggacattttggggtcaaat

SEQ ID NO: 15963 - DNA, 20 bp, Artificial Sequence
  Chr17_4 Reverse Primer
aaccacccctacaagtgcct

SEQ ID NO: 15964 - DNA, 20 bp, Artificial Sequence
  Chr17_4 Reverse Primer
aagtggctgggaaatcaatg

SEQ ID NO: 15965 - DNA, 20 bp, Artificial Sequence
  Chr17_4 Reverse Primer
acaaggagagcaccagcaat

SEQ ID NO: 15966 - DNA, 20 bp, Artificial Sequence
  Chr17_4 Reverse Primer
ttagctcagaggggacctga

SEQ ID NO: 15967 - DNA, 21 bp, Artificial Sequence
  Chr17_4 Reverse Primer
agctgtggggatacagttgtt

SEQ ID NO: 15968 - DNA, 20 bp, Artificial Sequence
  Chr17_4 Reverse Primer
gtagctcgttgggactttgc

SEQ ID NO: 15969 - DNA, 20 bp, Artificial Sequence
  Chr17_4 Reverse Primer
atgggaagggctgattcttc

SEQ ID NO: 15970 - DNA, 20 bp, Artificial Sequence
  Chr17_4 Reverse Primer
cctctgtccggtcctttctt

SEQ ID NO: 15971 - DNA, 21 bp, Artificial Sequence
  Chr17_4 Reverse Primer
ggtggtccccattaaacctaa

SEQ ID NO: 15972 - DNA, 20 bp, Artificial Sequence
  Chr17_4 Reverse Primer
gggaagccagaggtccttac

SEQ ID NO: 15973 - DNA, 20 bp, Artificial Sequence
  Chr17_4 Reverse Primer
accacaccaggctcaaagtc

SEQ ID NO: 15974 - DNA, 20 bp, Artificial Sequence
  Chr17_4 Reverse Primer
ctggtttccatgtcagtccc

SEQ ID NO: 15975 - DNA, 20 bp, Artificial Sequence
  Chr17_4 Reverse Primer
gataaaatcaagccctgcca

SEQ ID NO: 15976 - DNA, 20 bp, Artificial Sequence
  Chr17_4 Reverse Primer
gccagacaaatgagcagaca

SEQ ID NO: 15977 - DNA, 20 bp, Artificial Sequence
  Chr17_4 Reverse Primer
ccgttacagaccctgaaaaa

SEQ ID NO: 15978 - DNA, 20 bp, Artificial Sequence
  Chr17_4 Reverse Primer
aaggaaaggatgatggggtc

SEQ ID NO: 15979 - DNA, 20 bp, Artificial Sequence
  Chr17_4 Reverse Primer
tggaaatctgggagttgacc

SEQ ID NO: 15980 - DNA, 22 bp, Artificial Sequence
  Chr17_4 Reverse Primer
tcccaaaagaaagtagctcaga

SEQ ID NO: 15981 - DNA, 20 bp, Artificial Sequence
  Chr17_4 Reverse Primer
gagcttttctcccttgcaca

SEQ ID NO: 15982 - DNA, 20 bp, Artificial Sequence
  Chr17_4 Reverse Primer
aagtgggacccagagaggtt

SEQ ID NO: 15983 - DNA, 20 bp, Artificial Sequence
  Chr17_4 Reverse Primer
ctgcccactggtcaatctct

SEQ ID NO: 15984 - DNA, 20 bp, Artificial Sequence
  Chr17_4 Reverse Primer
ctccccagctctgacacttc

SEQ ID NO: 15985 - DNA, 20 bp, Artificial Sequence
  Chr17_4 Reverse Primer
gtgtgaggccctctgttgac

SEQ ID NO: 15986 - DNA, 20 bp, Artificial Sequence
  Chr17_4 Reverse Primer
tgcaggtggaagaactgaca

SEQ ID NO: 15987 - DNA, 20 bp, Artificial Sequence
  Chr17_4 Reverse Primer
tctgagtgtcatcaggtggc

SEQ ID NO: 15988 - DNA, 20 bp, Artificial Sequence
  Chr17_4 Reverse Primer
aagctcaatggaaggggatt

SEQ ID NO: 15989 - DNA, 20 bp, Artificial Sequence
  Chr17_4 Reverse Primer
ccctcctctttgtccacgta

SEQ ID NO: 15990 - DNA, 20 bp, Artificial Sequence
  Chr17_4 Reverse Primer
agagggggtatgtggttgtg

SEQ ID NO: 15991 - DNA, 20 bp, Artificial Sequence
  Chr17_4 Reverse Primer
taattctgaggccaggatgg

SEQ ID NO: 15992 - DNA, 20 bp, Artificial Sequence
  Chr17_4 Reverse Primer
cctgaatatgggcgatagga

SEQ ID NO: 15993 - DNA, 20 bp, Artificial Sequence
  Chr17_4 Reverse Primer
taaatcccaggaccagttgc

SEQ ID NO: 15994 - DNA, 20 bp, Artificial Sequence
  Chr17_4 Reverse Primer
aaagacagtggcaggtctgg

SEQ ID NO: 15995 - DNA, 20 bp, Artificial Sequence
  Chr17_4 Reverse Primer
gaagtgccctgggtcttttt

SEQ ID NO: 15996 - DNA, 20 bp, Artificial Sequence
  Chr17_4 Reverse Primer
ccagatactccctgaaccca

SEQ ID NO: 15997 - DNA, 20 bp, Artificial Sequence
  Chr17_4 Reverse Primer
gggagcatagcaaatagcca

SEQ ID NO: 15998 - DNA, 20 bp, Artificial Sequence
  Chr17_4 Reverse Primer
agagagtcagccactgctcc

SEQ ID NO: 15999 - DNA, 20 bp, Artificial Sequence
  Chr17_4 Reverse Primer
ttgcatcgctggcattatag

SEQ ID NO: 16000 - DNA, 20 bp, Artificial Sequence
  Chr17_4 Reverse Primer
cgtgccacattctttctgtg

SEQ ID NO: 16001 - DNA, 20 bp, Artificial Sequence
  Chr17_4 Reverse Primer
ggaccacgtttttcttgcat

SEQ ID NO: 16002 - DNA, 20 bp, Artificial Sequence
  Chr17_4 Reverse Primer
aattcatctttgggggttcc

SEQ ID NO: 16003 - DNA, 20 bp, Artificial Sequence
  Chr17_4 Reverse Primer
ggggaaactcactgagatgg

SEQ ID NO: 16004 - DNA, 20 bp, Artificial Sequence
  Chr17_4 Reverse Primer
agacaactcgggcaaagaaa

SEQ ID NO: 16005 - DNA, 20 bp, Artificial Sequence
  Chr17_4 Reverse Primer
tgaagttgattctccccagg

SEQ ID NO: 16006 - DNA, 20 bp, Artificial Sequence
  Chr17_4 Reverse Primer
caaatccacgcagaaaacct

SEQ ID NO: 16007 - DNA, 20 bp, Artificial Sequence
  Chr17_4 Reverse Primer
agggactccaaacgactgtg

SEQ ID NO: 16008 - DNA, 20 bp, Artificial Sequence
  Chr17_4 Reverse Primer
gacagcacatccttcagcag

SEQ ID NO: 16009 - DNA, 20 bp, Artificial Sequence
  Chr17_4 Reverse Primer
tccaagaggcctaccatcag

SEQ ID NO: 16010 - DNA, 20 bp, Artificial Sequence
  Chr17_4 Reverse Primer
tttgcaacaccagtatccga

SEQ ID NO: 16011 - DNA, 20 bp, Artificial Sequence
  Chr17_4 Reverse Primer
tacaggagcctaagccagga

SEQ ID NO: 16012 - DNA, 20 bp, Artificial Sequence
  Chr17_4 Reverse Primer
catctgtgtgtcatccccac

SEQ ID NO: 16013 - DNA, 20 bp, Artificial Sequence
  Chr17_5 Forward Primer
acgcctgatgggttaatgag

SEQ ID NO: 16014 - DNA, 20 bp, Artificial Sequence
  Chr17_5 Forward Primer
actggtctccctcactccct

SEQ ID NO: 16015 - DNA, 20 bp, Artificial Sequence
  Chr17_5 Forward Primer
cttgacaaatccagggctgt

SEQ ID NO: 16016 - DNA, 20 bp, Artificial Sequence
  Chr17_5 Forward Primer
tgaagggcaaaggaagagaa

SEQ ID NO: 16017 - DNA, 20 bp, Artificial Sequence
  Chr17_5 Forward Primer
tgtgaccaggaaccattctg

SEQ ID NO: 16018 - DNA, 20 bp, Artificial Sequence
  Chr17_5 Forward Primer
caaaagtgaggtgagtcgca

SEQ ID NO: 16019 - DNA, 20 bp, Artificial Sequence
  Chr17_5 Forward Primer
cacccctaggaaggaccaat

SEQ ID NO: 16020 - DNA, 20 bp, Artificial Sequence
  Chr17_5 Forward Primer
gatctgagtttgctgccctc

SEQ ID NO: 16021 - DNA, 20 bp, Artificial Sequence
  Chr17_5 Forward Primer
ccccttcctctcctcttgtc

SEQ ID NO: 16022 - DNA, 20 bp, Artificial Sequence
  Chr17_5 Forward Primer
atgcagagaggatgggtttg

SEQ ID NO: 16023 - DNA, 20 bp, Artificial Sequence
  Chr17_5 Forward Primer
cgatgtgactgtctcctccc

SEQ ID NO: 16024 - DNA, 20 bp, Artificial Sequence
  Chr17_5 Forward Primer
agagtcaccagcctctgcat

SEQ ID NO: 16025 - DNA, 20 bp, Artificial Sequence
  Chr17_5 Forward Primer
ctcctatcccgaagttgtgg

SEQ ID NO: 16026 - DNA, 20 bp, Artificial Sequence
  Chr17_5 Forward Primer
ctccccttcagacgattttg

SEQ ID NO: 16027 - DNA, 20 bp, Artificial Sequence
  Chr17_5 Forward Primer
gttctgctgccttttccttg

SEQ ID NO: 16028 - DNA, 20 bp, Artificial Sequence
  Chr17_5 Forward Primer
gcaggggagacaaaatgaaa

SEQ ID NO: 16029 - DNA, 20 bp, Artificial Sequence
  Chr17_5 Forward Primer
tccagccaacaataatgggt

SEQ ID NO: 16030 - DNA, 20 bp, Artificial Sequence
  Chr17_5 Forward Primer
ccagggtagttgtgcctgtc

SEQ ID NO: 16031 - DNA, 20 bp, Artificial Sequence
  Chr17_5 Forward Primer
catgtttacagatggctgcg

SEQ ID NO: 16032 - DNA, 20 bp, Artificial Sequence
  Chr17_5 Forward Primer
agtctgttgggggaggaagt

SEQ ID NO: 16033 - DNA, 20 bp, Artificial Sequence
  Chr17_5 Forward Primer
ttgtgctgtccctgaatctg

SEQ ID NO: 16034 - DNA, 20 bp, Artificial Sequence
  Chr17_5 Forward Primer
tatgcagggctgacgtagtg

SEQ ID NO: 16035 - DNA, 20 bp, Artificial Sequence
  Chr17_5 Forward Primer
aactccagctgaccctcctt

SEQ ID NO: 16036 - DNA, 20 bp, Artificial Sequence
  Chr17_5 Forward Primer
gaagcctttcccctgaaatc

SEQ ID NO: 16037 - DNA, 20 bp, Artificial Sequence
  Chr17_5 Forward Primer
ctggaactcacctacctgcc

SEQ ID NO: 16038 - DNA, 20 bp, Artificial Sequence
  Chr17_5 Forward Primer
tcggagtttatgaaatgccc

SEQ ID NO: 16039 - DNA, 20 bp, Artificial Sequence
  Chr17_5 Forward Primer
acaaccaagtgaggcaggtc

SEQ ID NO: 16040 - DNA, 19 bp, Artificial Sequence
  Chr17_5 Forward Primer
cactgctaaccagggggag

SEQ ID NO: 16041 - DNA, 20 bp, Artificial Sequence
  Chr17_5 Forward Primer
agcatctggacctagcatgg

SEQ ID NO: 16042 - DNA, 20 bp, Artificial Sequence
  Chr17_5 Forward Primer
ggacacgattttgtggaagg

SEQ ID NO: 16043 - DNA, 20 bp, Artificial Sequence
  Chr17_5 Forward Primer
tccctgtgcctcttcatctc

SEQ ID NO: 16044 - DNA, 20 bp, Artificial Sequence
  Chr17_5 Forward Primer
tctccgatgtgtaagggctc

SEQ ID NO: 16045 - DNA, 20 bp, Artificial Sequence
  Chr17_5 Forward Primer
cctcctctcacaggaacagg

SEQ ID NO: 16046 - DNA, 20 bp, Artificial Sequence
  Chr17_5 Forward Primer
acacagcggtgtgagaagtg

SEQ ID NO: 16047 - DNA, 20 bp, Artificial Sequence
  Chr17_5 Forward Primer
aaagggtttgagtgaaggca

SEQ ID NO: 16048 - DNA, 20 bp, Artificial Sequence
  Chr17_5 Forward Primer
tgagcactgagaaagagggg

SEQ ID NO: 16049 - DNA, 20 bp, Artificial Sequence
  Chr17_5 Forward Primer
agttccctggttcacttgga

SEQ ID NO: 16050 - DNA, 20 bp, Artificial Sequence
  Chr17_5 Forward Primer
tggctcagtgacctgttttg

SEQ ID NO: 16051 - DNA, 20 bp, Artificial Sequence
  Chr17_5 Forward Primer
tgcttccaaccttggttttt

SEQ ID NO: 16052 - DNA, 20 bp, Artificial Sequence
  Chr17_5 Forward Primer
agactgggtgaagagcaagg

SEQ ID NO: 16053 - DNA, 21 bp, Artificial Sequence
  Chr17_5 Forward Primer
cctagatccagatcacggtgt

SEQ ID NO: 16054 - DNA, 20 bp, Artificial Sequence
  Chr17_5 Forward Primer
tcctatccaccacaaggagc

SEQ ID NO: 16055 - DNA, 20 bp, Artificial Sequence
  Chr17_5 Forward Primer
ctgtgtggacctggatgaca

SEQ ID NO: 16056 - DNA, 20 bp, Artificial Sequence
  Chr17_5 Forward Primer
aggggactgcaaggaaagat

SEQ ID NO: 16057 - DNA, 20 bp, Artificial Sequence
  Chr17_5 Forward Primer
gaatctggagatgcggagag

SEQ ID NO: 16058 - DNA, 20 bp, Artificial Sequence
  Chr17_5 Forward Primer
gatccggaagtacacgatgc

SEQ ID NO: 16059 - DNA, 20 bp, Artificial Sequence
  Chr17_5 Forward Primer
gctgtggtttgtgatggttg

SEQ ID NO: 16060 - DNA, 20 bp, Artificial Sequence
  Chr17_5 Forward Primer
gagctacctggaggatgtgc

SEQ ID NO: 16061 - DNA, 20 bp, Artificial Sequence
  Chr17_5 Forward Primer
ggttcacccaccagagtgat

SEQ ID NO: 16062 - DNA, 20 bp, Artificial Sequence
  Chr17_5 Forward Primer
ctagcatgctgacctccctc

SEQ ID NO: 16063 - DNA, 20 bp, Artificial Sequence
  Chr17_5 Forward Primer
gacagcaccttctaccgctc

SEQ ID NO: 16064 - DNA, 20 bp, Artificial Sequence
  Chr17_5 Forward Primer
ctcctgtgaccctgtcacct

SEQ ID NO: 16065 - DNA, 18 bp, Artificial Sequence
  Chr17_5 Forward Primer
acatgaccccagccctct

SEQ ID NO: 16066 - DNA, 20 bp, Artificial Sequence
  Chr17_5 Forward Primer
tgggtcaccttctcttgacc

SEQ ID NO: 16067 - DNA, 20 bp, Artificial Sequence
  Chr17_5 Forward Primer
acggcagagaacccagagta

SEQ ID NO: 16068 - DNA, 20 bp, Artificial Sequence
  Chr17_5 Reverse Primer
aagtagaggcagggagagcc

SEQ ID NO: 16069 - DNA, 20 bp, Artificial Sequence
  Chr17_5 Reverse Primer
ccaaattctgtgctggaggt

SEQ ID NO: 16070 - DNA, 20 bp, Artificial Sequence
  Chr17_5 Reverse Primer
gagagtgggggaggagaaag

SEQ ID NO: 16071 - DNA, 20 bp, Artificial Sequence
  Chr17_5 Reverse Primer
cttgctcactcgacttgctg

SEQ ID NO: 16072 - DNA, 20 bp, Artificial Sequence
  Chr17_5 Reverse Primer
tcactctcatcactgcctgc

SEQ ID NO: 16073 - DNA, 20 bp, Artificial Sequence
  Chr17_5 Reverse Primer
actccctgagcccaggatta

SEQ ID NO: 16074 - DNA, 20 bp, Artificial Sequence
  Chr17_5 Reverse Primer
agtcgtctggtccacagtcc

SEQ ID NO: 16075 - DNA, 20 bp, Artificial Sequence
  Chr17_5 Reverse Primer
gctgctgattcgatttcctc

SEQ ID NO: 16076 - DNA, 18 bp, Artificial Sequence
  Chr17_5 Reverse Primer
cagacaatgcccagtccc

SEQ ID NO: 16077 - DNA, 20 bp, Artificial Sequence
  Chr17_5 Reverse Primer
ggaactttcccaaggtcaca

SEQ ID NO: 16078 - DNA, 20 bp, Artificial Sequence
  Chr17_5 Reverse Primer
atcctactccatcccaagcc

SEQ ID NO: 16079 - DNA, 20 bp, Artificial Sequence
  Chr17_5 Reverse Primer
cacctcctccttctcctgtg

SEQ ID NO: 16080 - DNA, 20 bp, Artificial Sequence
  Chr17_5 Reverse Primer
cgctctacgcaatacaccct

SEQ ID NO: 16081 - DNA, 20 bp, Artificial Sequence
  Chr17_5 Reverse Primer
gagcacagtccctaagctgg

SEQ ID NO: 16082 - DNA, 20 bp, Artificial Sequence
  Chr17_5 Reverse Primer
atgctggcagaacttccact

SEQ ID NO: 16083 - DNA, 20 bp, Artificial Sequence
  Chr17_5 Reverse Primer
acacaaagcccagacacaca

SEQ ID NO: 16084 - DNA, 20 bp, Artificial Sequence
  Chr17_5 Reverse Primer
gtagggcccaaaaggaagac

SEQ ID NO: 16085 - DNA, 20 bp, Artificial Sequence
  Chr17_5 Reverse Primer
tgggacaacacaaacattcg

SEQ ID NO: 16086 - DNA, 20 bp, Artificial Sequence
  Chr17_5 Reverse Primer
accctagctcagctgctcac

SEQ ID NO: 16087 - DNA, 20 bp, Artificial Sequence
  Chr17_5 Reverse Primer
ccacaaactggtggtctcct

SEQ ID NO: 16088 - DNA, 20 bp, Artificial Sequence
  Chr17_5 Reverse Primer
ctgccagtgaggggagatta

SEQ ID NO: 16089 - DNA, 20 bp, Artificial Sequence
  Chr17_5 Reverse Primer
ccatgaagagaaaaggagcg

SEQ ID NO: 16090 - DNA, 20 bp, Artificial Sequence
  Chr17_5 Reverse Primer
cagggcaaaggggtaaaaat

SEQ ID NO: 16091 - DNA, 20 bp, Artificial Sequence
  Chr17_5 Reverse Primer
gagagcagatgggtcagagg

SEQ ID NO: 16092 - DNA, 20 bp, Artificial Sequence
  Chr17_5 Reverse Primer
tgcagtaaaatgaatggggg

SEQ ID NO: 16093 - DNA, 20 bp, Artificial Sequence
  Chr17_5 Reverse Primer
tggggctgaaataggaacac

SEQ ID NO: 16094 - DNA, 20 bp, Artificial Sequence
  Chr17_5 Reverse Primer
ggtttcaatgacggtgaagg

SEQ ID NO: 16095 - DNA, 20 bp, Artificial Sequence
  Chr17_5 Reverse Primer
acttcactcagccaagtggg

SEQ ID NO: 16096 - DNA, 20 bp, Artificial Sequence
  Chr17_5 Reverse Primer
tccccttctgtcaccttctg

SEQ ID NO: 16097 - DNA, 20 bp, Artificial Sequence
  Chr17_5 Reverse Primer
agggacagagagggaggaaa

SEQ ID NO: 16098 - DNA, 20 bp, Artificial Sequence
  Chr17_5 Reverse Primer
gcctgaggacagaaccagag

SEQ ID NO: 16099 - DNA, 20 bp, Artificial Sequence
  Chr17_5 Reverse Primer
gaccctcatcagcatcacct

SEQ ID NO: 16100 - DNA, 20 bp, Artificial Sequence
  Chr17_5 Reverse Primer
acccctcacaacaaccagac

SEQ ID NO: 16101 - DNA, 20 bp, Artificial Sequence
  Chr17_5 Reverse Primer
gggacacttgtagggctgag

SEQ ID NO: 16102 - DNA, 20 bp, Artificial Sequence
  Chr17_5 Reverse Primer
ctgcagaacaggatgcagag

SEQ ID NO: 16103 - DNA, 20 bp, Artificial Sequence
  Chr17_5 Reverse Primer
actatgggagaaaggtgggc

SEQ ID NO: 16104 - DNA, 20 bp, Artificial Sequence
  Chr17_5 Reverse Primer
ctgcagtactcggcattcct

SEQ ID NO: 16105 - DNA, 20 bp, Artificial Sequence
  Chr17_5 Reverse Primer
atagtctgaagggccccagt

SEQ ID NO: 16106 - DNA, 20 bp, Artificial Sequence
  Chr17_5 Reverse Primer
cttgagccagaaaatgggag

SEQ ID NO: 16107 - DNA, 20 bp, Artificial Sequence
  Chr17_5 Reverse Primer
ggagggtccttatagtgggc

SEQ ID NO: 16108 - DNA, 20 bp, Artificial Sequence
  Chr17_5 Reverse Primer
cgggagctcaactattccct

SEQ ID NO: 16109 - DNA, 20 bp, Artificial Sequence
  Chr17_5 Reverse Primer
attctgggaaccaccctctt

SEQ ID NO: 16110 - DNA, 21 bp, Artificial Sequence
  Chr17_5 Reverse Primer
gagcaggtcctctgtcacttg

SEQ ID NO: 16111 - DNA, 20 bp, Artificial Sequence
  Chr17_5 Reverse Primer
aaagcctagctcaaatgcca

SEQ ID NO: 16112 - DNA, 20 bp, Artificial Sequence
  Chr17_5 Reverse Primer
attgagggctagtttggggt

SEQ ID NO: 16113 - DNA, 20 bp, Artificial Sequence
  Chr17_5 Reverse Primer
caagcaccttcaccttcctc

SEQ ID NO: 16114 - DNA, 20 bp, Artificial Sequence
  Chr17_5 Reverse Primer
tcccggacatggtctaagag

SEQ ID NO: 16115 - DNA, 20 bp, Artificial Sequence
  Chr17_5 Reverse Primer
ttctcccatgggctagacac

SEQ ID NO: 16116 - DNA, 20 bp, Artificial Sequence
  Chr17_5 Reverse Primer
ggtctttccctaatcctggg

SEQ ID NO: 16117 - DNA, 20 bp, Artificial Sequence
  Chr17_5 Reverse Primer
gcctggcatactggactcat

SEQ ID NO: 16118 - DNA, 20 bp, Artificial Sequence
  Chr17_5 Reverse Primer
ggaggtaagcagacagccac

SEQ ID NO: 16119 - DNA, 20 bp, Artificial Sequence
  Chr17_5 Reverse Primer
attcccaggtcaccatcaaa

SEQ ID NO: 16120 - DNA, 20 bp, Artificial Sequence
  Chr17_5 Reverse Primer
gtgtctctgccactccctct

SEQ ID NO: 16121 - DNA, 20 bp, Artificial Sequence
  Chr17_5 Reverse Primer
caagtactcggggttctcca

SEQ ID NO: 16122 - DNA, 20 bp, Artificial Sequence
  Chr17_5 Reverse Primer
ctgggaactcaagcaggaag

SEQ ID NO: 16123 - DNA, 20 bp, Artificial Sequence
  Chr17_6 Forward Primer
ctcagagcctaggtttcccc

SEQ ID NO: 16124 - DNA, 20 bp, Artificial Sequence
  Chr17_6 Forward Primer
agttccacatccttccctcc

SEQ ID NO: 16125 - DNA, 20 bp, Artificial Sequence
  Chr17_6 Forward Primer
cccttctttggctgtgtctc

SEQ ID NO: 16126 - DNA, 20 bp, Artificial Sequence
  Chr17_6 Forward Primer
ctggaatctttcctggaggg

SEQ ID NO: 16127 - DNA, 20 bp, Artificial Sequence
  Chr17_6 Forward Primer
gcctagtgcctaccaagtgc

SEQ ID NO: 16128 - DNA, 20 bp, Artificial Sequence
  Chr17_6 Forward Primer
aagtgtcgcgtaaacaaccc

SEQ ID NO: 16129 - DNA, 20 bp, Artificial Sequence
  Chr17_6 Forward Primer
attggtcaaatcaacgtcgc

SEQ ID NO: 16130 - DNA, 20 bp, Artificial Sequence
  Chr17_6 Forward Primer
aactgtagatgcccaccagc

SEQ ID NO: 16131 - DNA, 20 bp, Artificial Sequence
  Chr17_6 Forward Primer
cccattgctgacttacggtt

SEQ ID NO: 16132 - DNA, 20 bp, Artificial Sequence
  Chr17_6 Forward Primer
cccaagtttcccgtttacag

SEQ ID NO: 16133 - DNA, 20 bp, Artificial Sequence
  Chr17_6 Forward Primer
tccagtggcttctaacaggc

SEQ ID NO: 16134 - DNA, 20 bp, Artificial Sequence
  Chr17_6 Forward Primer
ggcctgtcagagaggagaaa

SEQ ID NO: 16135 - DNA, 20 bp, Artificial Sequence
  Chr17_6 Forward Primer
ttgttgcagccaaccagtag

SEQ ID NO: 16136 - DNA, 20 bp, Artificial Sequence
  Chr17_6 Forward Primer
agggatgcagtagcgtgaac

SEQ ID NO: 16137 - DNA, 20 bp, Artificial Sequence
  Chr17_6 Forward Primer
ggcagcttaggggaagtcat

SEQ ID NO: 16138 - DNA, 20 bp, Artificial Sequence
  Chr17_6 Forward Primer
tgtgtcacaggacaagcaca

SEQ ID NO: 16139 - DNA, 20 bp, Artificial Sequence
  Chr17_6 Forward Primer
ggtgatcagggaaggtctca

SEQ ID NO: 16140 - DNA, 20 bp, Artificial Sequence
  Chr17_6 Forward Primer
atgattgctgaggtttgcct

SEQ ID NO: 16141 - DNA, 20 bp, Artificial Sequence
  Chr17_6 Forward Primer
caaaaagccaagaaagccag

SEQ ID NO: 16142 - DNA, 20 bp, Artificial Sequence
  Chr17_6 Forward Primer
tatgcactggcaggtagcag

SEQ ID NO: 16143 - DNA, 20 bp, Artificial Sequence
  Chr17_6 Forward Primer
agggagggacaggttgttct

SEQ ID NO: 16144 - DNA, 20 bp, Artificial Sequence
  Chr17_6 Forward Primer
gtaaacagacatggcccacc

SEQ ID NO: 16145 - DNA, 20 bp, Artificial Sequence
  Chr17_6 Forward Primer
caggtctaacacgtggagca

SEQ ID NO: 16146 - DNA, 20 bp, Artificial Sequence
  Chr17_6 Forward Primer
cagaggggctattggattga

SEQ ID NO: 16147 - DNA, 20 bp, Artificial Sequence
  Chr17_6 Forward Primer
aactttgaaagcaatgcagc

SEQ ID NO: 16148 - DNA, 20 bp, Artificial Sequence
  Chr17_6 Forward Primer
acatcagtgggaaatgcctc

SEQ ID NO: 16149 - DNA, 20 bp, Artificial Sequence
  Chr17_6 Forward Primer
catgggacagaaatgtgtgg

SEQ ID NO: 16150 - DNA, 20 bp, Artificial Sequence
  Chr17_6 Forward Primer
tccaacagatccacagacca

SEQ ID NO: 16151 - DNA, 20 bp, Artificial Sequence
  Chr17_6 Forward Primer
cagggggaaaaacaaggatt

SEQ ID NO: 16152 - DNA, 20 bp, Artificial Sequence
  Chr17_6 Forward Primer
tgagagccaaacatgcttca

SEQ ID NO: 16153 - DNA, 20 bp, Artificial Sequence
  Chr17_6 Forward Primer
ggaggagaggatcatggaca

SEQ ID NO: 16154 - DNA, 20 bp, Artificial Sequence
  Chr17_6 Forward Primer
ccatgatcaacaaagggacc

SEQ ID NO: 16155 - DNA, 20 bp, Artificial Sequence
  Chr17_6 Forward Primer
acaaccttgtgaacgccagt

SEQ ID NO: 16156 - DNA, 20 bp, Artificial Sequence
  Chr17_6 Forward Primer
cagcaggtggtacagatccc

SEQ ID NO: 16157 - DNA, 20 bp, Artificial Sequence
  Chr17_6 Forward Primer
cagaccccacactcttccat

SEQ ID NO: 16158 - DNA, 20 bp, Artificial Sequence
  Chr17_6 Forward Primer
cagccatttgtcgagcatta

SEQ ID NO: 16159 - DNA, 20 bp, Artificial Sequence
  Chr17_6 Forward Primer
agctgcaattctccgaaaag

SEQ ID NO: 16160 - DNA, 20 bp, Artificial Sequence
  Chr17_6 Forward Primer
ctgaactctgcccctctttg

SEQ ID NO: 16161 - DNA, 20 bp, Artificial Sequence
  Chr17_6 Forward Primer
cctcactgcatcctgttcct

SEQ ID NO: 16162 - DNA, 20 bp, Artificial Sequence
  Chr17_6 Forward Primer
gacgttctaaaccaggacgc

SEQ ID NO: 16163 - DNA, 20 bp, Artificial Sequence
  Chr17_6 Forward Primer
caacctctcctccagcacat

SEQ ID NO: 16164 - DNA, 20 bp, Artificial Sequence
  Chr17_6 Forward Primer
ggtctctcagagcgatccac

SEQ ID NO: 16165 - DNA, 20 bp, Artificial Sequence
  Chr17_6 Forward Primer
ccagaaggctacagtctggc

SEQ ID NO: 16166 - DNA, 20 bp, Artificial Sequence
  Chr17_6 Forward Primer
gttgcgatgttgtgcagatt

SEQ ID NO: 16167 - DNA, 20 bp, Artificial Sequence
  Chr17_6 Forward Primer
ctctgccctttccctcttct

SEQ ID NO: 16168 - DNA, 20 bp, Artificial Sequence
  Chr17_6 Forward Primer
ctgactccccagcatcattt

SEQ ID NO: 16169 - DNA, 20 bp, Artificial Sequence
  Chr17_6 Forward Primer
atctttccagtgcccttgtg

SEQ ID NO: 16170 - DNA, 20 bp, Artificial Sequence
  Chr17_6 Forward Primer
agcacctgttgcttctgctt

SEQ ID NO: 16171 - DNA, 20 bp, Artificial Sequence
  Chr17_6 Forward Primer
catccattgtgtcatcagcc

SEQ ID NO: 16172 - DNA, 20 bp, Artificial Sequence
  Chr17_6 Forward Primer
acccaagcagcatcagaatc

SEQ ID NO: 16173 - DNA, 20 bp, Artificial Sequence
  Chr17_6 Forward Primer
ccatgtgcaaaaatgtcctg

SEQ ID NO: 16174 - DNA, 20 bp, Artificial Sequence
  Chr17_6 Forward Primer
tccttgactctccatttccc

SEQ ID NO: 16175 - DNA, 20 bp, Artificial Sequence
  Chr17_6 Forward Primer
tcccactcagaaagtccctg

SEQ ID NO: 16176 - DNA, 20 bp, Artificial Sequence
  Chr17_6 Reverse Primer
gggggcgataacaataacaa

SEQ ID NO: 16177 - DNA, 20 bp, Artificial Sequence
  Chr17_6 Reverse Primer
ccagcttcttccacttccac

SEQ ID NO: 16178 - DNA, 20 bp, Artificial Sequence
  Chr17_6 Reverse Primer
gcttctcctatcctggaggc

SEQ ID NO: 16179 - DNA, 20 bp, Artificial Sequence
  Chr17_6 Reverse Primer
gatccttcatgggatccgta

SEQ ID NO: 16180 - DNA, 20 bp, Artificial Sequence
  Chr17_6 Reverse Primer
tgcatctgaatcatccgaag

SEQ ID NO: 16181 - DNA, 20 bp, Artificial Sequence
  Chr17_6 Reverse Primer
ctaagtccagtctcgcccag

SEQ ID NO: 16182 - DNA, 20 bp, Artificial Sequence
  Chr17_6 Reverse Primer
tacgacatcttcctccctgg

SEQ ID NO: 16183 - DNA, 20 bp, Artificial Sequence
  Chr17_6 Reverse Primer
aaggaaggtttttgcccact

SEQ ID NO: 16184 - DNA, 20 bp, Artificial Sequence
  Chr17_6 Reverse Primer
gactgagtccccttggatga

SEQ ID NO: 16185 - DNA, 20 bp, Artificial Sequence
  Chr17_6 Reverse Primer
ccattatttcctttgcagcc

SEQ ID NO: 16186 - DNA, 20 bp, Artificial Sequence
  Chr17_6 Reverse Primer
tggcaaagagtttctggctt

SEQ ID NO: 16187 - DNA, 20 bp, Artificial Sequence
  Chr17_6 Reverse Primer
acttgggatctgccacagac

SEQ ID NO: 16188 - DNA, 20 bp, Artificial Sequence
  Chr17_6 Reverse Primer
tccatagccattgtccacct

SEQ ID NO: 16189 - DNA, 20 bp, Artificial Sequence
  Chr17_6 Reverse Primer
cctgtaggtgctgggaagaa

SEQ ID NO: 16190 - DNA, 19 bp, Artificial Sequence
  Chr17_6 Reverse Primer
ctcattgggggagcctaag

SEQ ID NO: 16191 - DNA, 20 bp, Artificial Sequence
  Chr17_6 Reverse Primer
accacaaagggacaaactgg

SEQ ID NO: 16192 - DNA, 20 bp, Artificial Sequence
  Chr17_6 Reverse Primer
tcactgctttagccatgctg

SEQ ID NO: 16193 - DNA, 20 bp, Artificial Sequence
  Chr17_6 Reverse Primer
ttttccagttgcctagcctg

SEQ ID NO: 16194 - DNA, 20 bp, Artificial Sequence
  Chr17_6 Reverse Primer
caggctgttcgactgttcct

SEQ ID NO: 16195 - DNA, 20 bp, Artificial Sequence
  Chr17_6 Reverse Primer
ctttcccttccaactctccc

SEQ ID NO: 16196 - DNA, 20 bp, Artificial Sequence
  Chr17_6 Reverse Primer
tcaccatgatccacctgaga

SEQ ID NO: 16197 - DNA, 20 bp, Artificial Sequence
  Chr17_6 Reverse Primer
cctcacccttcaggtctctg

SEQ ID NO: 16198 - DNA, 20 bp, Artificial Sequence
  Chr17_6 Reverse Primer
ggattttctcccacctctcc

SEQ ID NO: 16199 - DNA, 20 bp, Artificial Sequence
  Chr17_6 Reverse Primer
ctctacctcctgtcccctcc

SEQ ID NO: 16200 - DNA, 20 bp, Artificial Sequence
  Chr17_6 Reverse Primer
aagcgagcctaaatggtgtt

SEQ ID NO: 16201 - DNA, 20 bp, Artificial Sequence
  Chr17_6 Reverse Primer
gcaccatttcagcttggttt

SEQ ID NO: 16202 - DNA, 23 bp, Artificial Sequence
  Chr17_6 Reverse Primer
agatcaatgagctgacacacaga

SEQ ID NO: 16203 - DNA, 20 bp, Artificial Sequence
  Chr17_6 Reverse Primer
ctgaaccttccccagtctca

SEQ ID NO: 16204 - DNA, 20 bp, Artificial Sequence
  Chr17_6 Reverse Primer
actgaggaaaggagggagga

SEQ ID NO: 16205 - DNA, 19 bp, Artificial Sequence
  Chr17_6 Reverse Primer
caggcatgttgccagtacc

SEQ ID NO: 16206 - DNA, 20 bp, Artificial Sequence
  Chr17_6 Reverse Primer
ggcaggtttgatagggacaa

SEQ ID NO: 16207 - DNA, 20 bp, Artificial Sequence
  Chr17_6 Reverse Primer
tactcgacttctggatgggg

SEQ ID NO: 16208 - DNA, 20 bp, Artificial Sequence
  Chr17_6 Reverse Primer
ggttatttcctgcctggatg

SEQ ID NO: 16209 - DNA, 20 bp, Artificial Sequence
  Chr17_6 Reverse Primer
ccagcatcatcttcaaagca

SEQ ID NO: 16210 - DNA, 20 bp, Artificial Sequence
  Chr17_6 Reverse Primer
aaaggctctcttctccaccc

SEQ ID NO: 16211 - DNA, 20 bp, Artificial Sequence
  Chr17_6 Reverse Primer
caaggactgtctgcacctca

SEQ ID NO: 16212 - DNA, 20 bp, Artificial Sequence
  Chr17_6 Reverse Primer
gagcaggtaccactgccaac

SEQ ID NO: 16213 - DNA, 20 bp, Artificial Sequence
  Chr17_6 Reverse Primer
acctcttctccccatccttg

SEQ ID NO: 16214 - DNA, 20 bp, Artificial Sequence
  Chr17_6 Reverse Primer
aaccagttgcagacaaaggg

SEQ ID NO: 16215 - DNA, 20 bp, Artificial Sequence
  Chr17_6 Reverse Primer
agtttctccagaggtgggtg

SEQ ID NO: 16216 - DNA, 20 bp, Artificial Sequence
  Chr17_6 Reverse Primer
aactgaaagcaggcatcagg

SEQ ID NO: 16217 - DNA, 20 bp, Artificial Sequence
  Chr17_6 Reverse Primer
tgtgtacaggcaaaactggc

SEQ ID NO: 16218 - DNA, 21 bp, Artificial Sequence
  Chr17_6 Reverse Primer
ccaaaaggcacaatcaacttc

SEQ ID NO: 16219 - DNA, 20 bp, Artificial Sequence
  Chr17_6 Reverse Primer
caggggaatggatagctcaa

SEQ ID NO: 16220 - DNA, 20 bp, Artificial Sequence
  Chr17_6 Reverse Primer
tctagtcatgcagtccacgc

SEQ ID NO: 16221 - DNA, 20 bp, Artificial Sequence
  Chr17_6 Reverse Primer
tgcccacaagtctttctgtg

SEQ ID NO: 16222 - DNA, 20 bp, Artificial Sequence
  Chr17_6 Reverse Primer
gactcaaatggagaacccga

SEQ ID NO: 16223 - DNA, 20 bp, Artificial Sequence
  Chr17_6 Reverse Primer
ggtctgcagcctgttctttc

SEQ ID NO: 16224 - DNA, 20 bp, Artificial Sequence
  Chr17_6 Reverse Primer
catcatggccaagcttttct

SEQ ID NO: 16225 - DNA, 20 bp, Artificial Sequence
  Chr17_6 Reverse Primer
ggttccttggcatctgtgtt

SEQ ID NO: 16226 - DNA, 20 bp, Artificial Sequence
  Chr17_6 Reverse Primer
acattgtgggtggctggtat

SEQ ID NO: 16227 - DNA, 20 bp, Artificial Sequence
  Chr17_6 Reverse Primer
agtgtgagggttgatgggac

SEQ ID NO: 16228 - DNA, 20 bp, Artificial Sequence
  Chr17_6 Reverse Primer
ccttggcgattagcaaagaa

SEQ ID NO: 16229 - DNA, 20 bp, Artificial Sequence
  Chr17_7 Forward Primer
aacaccaaaaggggcagata

SEQ ID NO: 16230 - DNA, 21 bp, Artificial Sequence
  Chr17_7 Forward Primer
aaatcactttttccctagccc

SEQ ID NO: 16231 - DNA, 20 bp, Artificial Sequence
  Chr17_7 Forward Primer
gtatcatgctgcttcacccc

SEQ ID NO: 16232 - DNA, 20 bp, Artificial Sequence
  Chr17_7 Forward Primer
tggttaaggtggcaaccact

SEQ ID NO: 16233 - DNA, 20 bp, Artificial Sequence
  Chr17_7 Forward Primer
catcccctggcctctttatt

SEQ ID NO: 16234 - DNA, 20 bp, Artificial Sequence
  Chr17_7 Forward Primer
tccctttctgaaacctggaa

SEQ ID NO: 16235 - DNA, 22 bp, Artificial Sequence
  Chr17_7 Forward Primer
aaatacaatttgaagtgcgtgc

SEQ ID NO: 16236 - DNA, 20 bp, Artificial Sequence
  Chr17_7 Forward Primer
aaagccaaacagaaccagga

SEQ ID NO: 16237 - DNA, 20 bp, Artificial Sequence
  Chr17_7 Forward Primer
tcacgtggctgttacatcgt

SEQ ID NO: 16238 - DNA, 20 bp, Artificial Sequence
  Chr17_7 Forward Primer
ccagcatttctactctgccc

SEQ ID NO: 16239 - DNA, 21 bp, Artificial Sequence
  Chr17_7 Forward Primer
cttttcaaggactggatgtgc

SEQ ID NO: 16240 - DNA, 20 bp, Artificial Sequence
  Chr17_7 Forward Primer
tgtaatagtcgcagcatggc

SEQ ID NO: 16241 - DNA, 20 bp, Artificial Sequence
  Chr17_7 Forward Primer
tcaaacatgtggttgccttt

SEQ ID NO: 16242 - DNA, 20 bp, Artificial Sequence
  Chr17_7 Forward Primer
ccagctctctgctcctgtct

SEQ ID NO: 16243 - DNA, 20 bp, Artificial Sequence
  Chr17_7 Forward Primer
gcaatgggtcagatttccat

SEQ ID NO: 16244 - DNA, 20 bp, Artificial Sequence
  Chr17_7 Forward Primer
taagccatgctgtccaacac

SEQ ID NO: 16245 - DNA, 20 bp, Artificial Sequence
  Chr17_7 Forward Primer
cattctgtttccggaggcta

SEQ ID NO: 16246 - DNA, 20 bp, Artificial Sequence
  Chr17_7 Forward Primer
ggccctctgtggaagtaaca

SEQ ID NO: 16247 - DNA, 20 bp, Artificial Sequence
  Chr17_7 Forward Primer
cattttagggctccctctcc

SEQ ID NO: 16248 - DNA, 20 bp, Artificial Sequence
  Chr17_7 Forward Primer
ggactgaaaagctctggctg

SEQ ID NO: 16249 - DNA, 20 bp, Artificial Sequence
  Chr17_7 Forward Primer
cctatttccccagatgggat

SEQ ID NO: 16250 - DNA, 20 bp, Artificial Sequence
  Chr17_7 Forward Primer
ctagctgtgtgcaaccctga

SEQ ID NO: 16251 - DNA, 20 bp, Artificial Sequence
  Chr17_7 Forward Primer
ggtgtttcctgtccctctga

SEQ ID NO: 16252 - DNA, 20 bp, Artificial Sequence
  Chr17_7 Forward Primer
acccagacggtgaatctgag

SEQ ID NO: 16253 - DNA, 20 bp, Artificial Sequence
  Chr17_7 Forward Primer
caccaggcttagggactcag

SEQ ID NO: 16254 - DNA, 20 bp, Artificial Sequence
  Chr17_7 Forward Primer
catatggggaagggtagtgg

SEQ ID NO: 16255 - DNA, 21 bp, Artificial Sequence
  Chr17_7 Forward Primer
gcttggaaaaataaaaccgat

SEQ ID NO: 16256 - DNA, 20 bp, Artificial Sequence
  Chr17_7 Forward Primer
ccatgtgattcccgtttgat

SEQ ID NO: 16257 - DNA, 20 bp, Artificial Sequence
  Chr17_7 Forward Primer
tttaaaggttggggaggtca

SEQ ID NO: 16258 - DNA, 20 bp, Artificial Sequence
  Chr17_7 Forward Primer
atggcacataaggggttcag

SEQ ID NO: 16259 - DNA, 20 bp, Artificial Sequence
  Chr17_7 Forward Primer
agagagggcttcattcatgc

SEQ ID NO: 16260 - DNA, 20 bp, Artificial Sequence
  Chr17_7 Forward Primer
agctgcctatgtgacaccct

SEQ ID NO: 16261 - DNA, 20 bp, Artificial Sequence
  Chr17_7 Forward Primer
ttgtcatgaaaggggaggag

SEQ ID NO: 16262 - DNA, 20 bp, Artificial Sequence
  Chr17_7 Forward Primer
agagctggagtagcctctgc

SEQ ID NO: 16263 - DNA, 20 bp, Artificial Sequence
  Chr17_7 Forward Primer
tgtctgccagaagatccaga

SEQ ID NO: 16264 - DNA, 20 bp, Artificial Sequence
  Chr17_7 Forward Primer
aagggaacagccagacactg

SEQ ID NO: 16265 - DNA, 20 bp, Artificial Sequence
  Chr17_7 Forward Primer
atccagtggaagcagcagtt

SEQ ID NO: 16266 - DNA, 20 bp, Artificial Sequence
  Chr17_7 Forward Primer
accatctcctccagggactt

SEQ ID NO: 16267 - DNA, 20 bp, Artificial Sequence
  Chr17_7 Forward Primer
tgaacaagaatgcaacggag

SEQ ID NO: 16268 - DNA, 21 bp, Artificial Sequence
  Chr17_7 Forward Primer
gagacggctgccatgttatag

SEQ ID NO: 16269 - DNA, 20 bp, Artificial Sequence
  Chr17_7 Forward Primer
gggttcttctgtcaaggctg

SEQ ID NO: 16270 - DNA, 20 bp, Artificial Sequence
  Chr17_7 Forward Primer
tcatctcccagtgccttctt

SEQ ID NO: 16271 - DNA, 20 bp, Artificial Sequence
  Chr17_7 Forward Primer
aagatccatgtgatcctggc

SEQ ID NO: 16272 - DNA, 20 bp, Artificial Sequence
  Chr17_7 Forward Primer
tcattccaccccaacaaact

SEQ ID NO: 16273 - DNA, 20 bp, Artificial Sequence
  Chr17_7 Forward Primer
gccacctgctctaccagaat

SEQ ID NO: 16274 - DNA, 20 bp, Artificial Sequence
  Chr17_7 Forward Primer
tgctacctccctctgcagtt

SEQ ID NO: 16275 - DNA, 20 bp, Artificial Sequence
  Chr17_7 Forward Primer
tgtaacaatccagcccaagc

SEQ ID NO: 16276 - DNA, 20 bp, Artificial Sequence
  Chr17_7 Forward Primer
tttaccttctgccacatccc

SEQ ID NO: 16277 - DNA, 20 bp, Artificial Sequence
  Chr17_7 Forward Primer
tgacatccagctcactcgtc

SEQ ID NO: 16278 - DNA, 20 bp, Artificial Sequence
  Chr17_7 Forward Primer
ttaggctgggatttgaggtg

SEQ ID NO: 16279 - DNA, 20 bp, Artificial Sequence
  Chr17_7 Forward Primer
ggcagctagcaaaagcaaag

SEQ ID NO: 16280 - DNA, 21 bp, Artificial Sequence
  Chr17_7 Forward Primer
ccttttgtgagtgtgcatcag

SEQ ID NO: 16281 - DNA, 20 bp, Artificial Sequence
  Chr17_7 Forward Primer
attggcatgaaatggtgtca

SEQ ID NO: 16282 - DNA, 20 bp, Artificial Sequence
  Chr17_7 Forward Primer
ttgattactggtccttgggg

SEQ ID NO: 16283 - DNA, 20 bp, Artificial Sequence
  Chr17_7 Forward Primer
tctgttaaggggtggctttg

SEQ ID NO: 16284 - DNA, 21 bp, Artificial Sequence
  Chr17_7 Reverse Primer
cagaaggatgtacagggcaag

SEQ ID NO: 16285 - DNA, 21 bp, Artificial Sequence
  Chr17_7 Reverse Primer
tccataaagggtgttcaagga

SEQ ID NO: 16286 - DNA, 21 bp, Artificial Sequence
  Chr17_7 Reverse Primer
tgcataaatcttgagtcgtgg

SEQ ID NO: 16287 - DNA, 20 bp, Artificial Sequence
  Chr17_7 Reverse Primer
aacttgcattctttgacccc

SEQ ID NO: 16288 - DNA, 20 bp, Artificial Sequence
  Chr17_7 Reverse Primer
aaatggttgccctaccacag

SEQ ID NO: 16289 - DNA, 20 bp, Artificial Sequence
  Chr17_7 Reverse Primer
caggaaggcctgttcttgag

SEQ ID NO: 16290 - DNA, 23 bp, Artificial Sequence
  Chr17_7 Reverse Primer
aaatggaaattcattgcttgaaa

SEQ ID NO: 16291 - DNA, 20 bp, Artificial Sequence
  Chr17_7 Reverse Primer
agtgcccgtccaagtaaatg

SEQ ID NO: 16292 - DNA, 20 bp, Artificial Sequence
  Chr17_7 Reverse Primer
gccacccttgagggtagaaa

SEQ ID NO: 16293 - DNA, 20 bp, Artificial Sequence
  Chr17_7 Reverse Primer
gtaaggaggcttccagaggg

SEQ ID NO: 16294 - DNA, 20 bp, Artificial Sequence
  Chr17_7 Reverse Primer
cacctggatggctacctgat

SEQ ID NO: 16295 - DNA, 20 bp, Artificial Sequence
  Chr17_7 Reverse Primer
tatctgggccatttcaggag

SEQ ID NO: 16296 - DNA, 20 bp, Artificial Sequence
  Chr17_7 Reverse Primer
tggatttgaaccccctaaca

SEQ ID NO: 16297 - DNA, 20 bp, Artificial Sequence
  Chr17_7 Reverse Primer
gggttgatgcaaggattgag

SEQ ID NO: 16298 - DNA, 20 bp, Artificial Sequence
  Chr17_7 Reverse Primer
taggttggccacctctatgc

SEQ ID NO: 16299 - DNA, 20 bp, Artificial Sequence
  Chr17_7 Reverse Primer
aaagtaagcccatttttgcc

SEQ ID NO: 16300 - DNA, 20 bp, Artificial Sequence
  Chr17_7 Reverse Primer
gcagcaccatgttccttctt

SEQ ID NO: 16301 - DNA, 20 bp, Artificial Sequence
  Chr17_7 Reverse Primer
taacccctatgtgaaggggg

SEQ ID NO: 16302 - DNA, 20 bp, Artificial Sequence
  Chr17_7 Reverse Primer
cgcactggttccacactcta

SEQ ID NO: 16303 - DNA, 20 bp, Artificial Sequence
  Chr17_7 Reverse Primer
tgcagtttttccagtcatgc

SEQ ID NO: 16304 - DNA, 20 bp, Artificial Sequence
  Chr17_7 Reverse Primer
gtagaatgccacagacgggt

SEQ ID NO: 16305 - DNA, 20 bp, Artificial Sequence
  Chr17_7 Reverse Primer
tccactttggggcaagtaat

SEQ ID NO: 16306 - DNA, 20 bp, Artificial Sequence
  Chr17_7 Reverse Primer
tgtagatgtcccatcaccca

SEQ ID NO: 16307 - DNA, 20 bp, Artificial Sequence
  Chr17_7 Reverse Primer
atgctgcttctgaagggttc

SEQ ID NO: 16308 - DNA, 21 bp, Artificial Sequence
  Chr17_7 Reverse Primer
aagaagacccatcacacagga

SEQ ID NO: 16309 - DNA, 22 bp, Artificial Sequence
  Chr17_7 Reverse Primer
catgcctctgtttgtcattgat

SEQ ID NO: 16310 - DNA, 20 bp, Artificial Sequence
  Chr17_7 Reverse Primer
aacgtgtgcaccaagtgtgt

SEQ ID NO: 16311 - DNA, 21 bp, Artificial Sequence
  Chr17_7 Reverse Primer
aaaaggatctcagcaaccaca

SEQ ID NO: 16312 - DNA, 20 bp, Artificial Sequence
  Chr17_7 Reverse Primer
atcttctctctcttgccccc

SEQ ID NO: 16313 - DNA, 20 bp, Artificial Sequence
  Chr17_7 Reverse Primer
gggtcttctagcttgggtgg

SEQ ID NO: 16314 - DNA, 20 bp, Artificial Sequence
  Chr17_7 Reverse Primer
cactctctgtacggtggcaa

SEQ ID NO: 16315 - DNA, 20 bp, Artificial Sequence
  Chr17_7 Reverse Primer
atagatcctggggaaaggga

SEQ ID NO: 16316 - DNA, 20 bp, Artificial Sequence
  Chr17_7 Reverse Primer
caacaacaccaaactgctgg

SEQ ID NO: 16317 - DNA, 20 bp, Artificial Sequence
  Chr17_7 Reverse Primer
tgttgcagctgtcctcaaag

SEQ ID NO: 16318 - DNA, 20 bp, Artificial Sequence
  Chr17_7 Reverse Primer
taggtaagcatcccactgcc

SEQ ID NO: 16319 - DNA, 20 bp, Artificial Sequence
  Chr17_7 Reverse Primer
atgttggggagcaaacatca

SEQ ID NO: 16320 - DNA, 20 bp, Artificial Sequence
  Chr17_7 Reverse Primer
cagtaatttcagggctggga

SEQ ID NO: 16321 - DNA, 20 bp, Artificial Sequence
  Chr17_7 Reverse Primer
tctttgcactatgccacagc

SEQ ID NO: 16322 - DNA, 20 bp, Artificial Sequence
  Chr17_7 Reverse Primer
ttagcaaatgctgctgcaag

SEQ ID NO: 16323 - DNA, 20 bp, Artificial Sequence
  Chr17_7 Reverse Primer
tcccagctgaagtgatgaaa

SEQ ID NO: 16324 - DNA, 20 bp, Artificial Sequence
  Chr17_7 Reverse Primer
ctctttgttctggcctcacc

SEQ ID NO: 16325 - DNA, 20 bp, Artificial Sequence
  Chr17_7 Reverse Primer
gtgattctgtgcctcccact

SEQ ID NO: 16326 - DNA, 20 bp, Artificial Sequence
  Chr17_7 Reverse Primer
atgtactcgacatgtccccc

SEQ ID NO: 16327 - DNA, 20 bp, Artificial Sequence
  Chr17_7 Reverse Primer
ccagagctgagacctccaag

SEQ ID NO: 16328 - DNA, 20 bp, Artificial Sequence
  Chr17_7 Reverse Primer
atacctggcaagtgctggac

SEQ ID NO: 16329 - DNA, 20 bp, Artificial Sequence
  Chr17_7 Reverse Primer
acctcctgggatctcacctt

SEQ ID NO: 16330 - DNA, 20 bp, Artificial Sequence
  Chr17_7 Reverse Primer
ggctccctaactggatttca

SEQ ID NO: 16331 - DNA, 20 bp, Artificial Sequence
  Chr17_7 Reverse Primer
tccagagacattgggtggtt

SEQ ID NO: 16332 - DNA, 20 bp, Artificial Sequence
  Chr17_7 Reverse Primer
aattttgttgtgtccctccg

SEQ ID NO: 16333 - DNA, 20 bp, Artificial Sequence
  Chr17_7 Reverse Primer
gcttgagaggtacaggcagc

SEQ ID NO: 16334 - DNA, 21 bp, Artificial Sequence
  Chr17_7 Reverse Primer
tttggtggtagaaaaggcaga

SEQ ID NO: 16335 - DNA, 20 bp, Artificial Sequence
  Chr17_7 Reverse Primer
gctaccaggaaatgcagacc

SEQ ID NO: 16336 - DNA, 20 bp, Artificial Sequence
  Chr17_7 Reverse Primer
cctcagctcgtgaggactgt

SEQ ID NO: 16337 - DNA, 20 bp, Artificial Sequence
  Chr17_7 Reverse Primer
aaatctagaaaccgcccacc

SEQ ID NO: 16338 - DNA, 20 bp, Artificial Sequence
  Chr17_7 Reverse Primer
cggttccaaggtggtcatta

SEQ ID NO: 16339 - DNA, 20 bp, Artificial Sequence
  Chr17_8 Forward Primer
gcagggatctgttttcagga

SEQ ID NO: 16340 - DNA, 20 bp, Artificial Sequence
  Chr17_8 Forward Primer
ggctaaacttgccgcataag

SEQ ID NO: 16341 - DNA, 20 bp, Artificial Sequence
  Chr17_8 Forward Primer
ctctgcaacctgcacacagt

SEQ ID NO: 16342 - DNA, 20 bp, Artificial Sequence
  Chr17_8 Forward Primer
gggtgtgacaacgagaaaca

SEQ ID NO: 16343 - DNA, 20 bp, Artificial Sequence
  Chr17_8 Forward Primer
gaagtgcttcttcaggccac

SEQ ID NO: 16344 - DNA, 20 bp, Artificial Sequence
  Chr17_8 Forward Primer
cttactgagcagcaggtccc

SEQ ID NO: 16345 - DNA, 20 bp, Artificial Sequence
  Chr17_8 Forward Primer
tcacatttcccttttccagg

SEQ ID NO: 16346 - DNA, 20 bp, Artificial Sequence
  Chr17_8 Forward Primer
ccagaggaggtcagagcaac

SEQ ID NO: 16347 - DNA, 20 bp, Artificial Sequence
  Chr17_8 Forward Primer
ctgagagagggctccacatc

SEQ ID NO: 16348 - DNA, 20 bp, Artificial Sequence
  Chr17_8 Forward Primer
accaggcaggagacaaacac

SEQ ID NO: 16349 - DNA, 19 bp, Artificial Sequence
  Chr17_8 Forward Primer
agcttgtttcccctcaacg

SEQ ID NO: 16350 - DNA, 20 bp, Artificial Sequence
  Chr17_8 Forward Primer
ccctgtgtttacctgccact

SEQ ID NO: 16351 - DNA, 20 bp, Artificial Sequence
  Chr17_8 Forward Primer
cagtctctgctcccctcaag

SEQ ID NO: 16352 - DNA, 20 bp, Artificial Sequence
  Chr17_8 Forward Primer
ctcaggacctcccttcacag

SEQ ID NO: 16353 - DNA, 20 bp, Artificial Sequence
  Chr17_8 Forward Primer
aagctaggtctgcaccaagg

SEQ ID NO: 16354 - DNA, 20 bp, Artificial Sequence
  Chr17_8 Forward Primer
tcatcctcctaccagatggg

SEQ ID NO: 16355 - DNA, 20 bp, Artificial Sequence
  Chr17_8 Forward Primer
acctgatcagtgttgggagc

SEQ ID NO: 16356 - DNA, 20 bp, Artificial Sequence
  Chr17_8 Forward Primer
gagtgttaggtcagccaggg

SEQ ID NO: 16357 - DNA, 20 bp, Artificial Sequence
  Chr17_8 Forward Primer
agctttcagggcaaagttca

SEQ ID NO: 16358 - DNA, 20 bp, Artificial Sequence
  Chr17_8 Forward Primer
ggtcaggtaggggttgttga

SEQ ID NO: 16359 - DNA, 20 bp, Artificial Sequence
  Chr17_8 Forward Primer
ggcccatgactgtcctttac

SEQ ID NO: 16360 - DNA, 20 bp, Artificial Sequence
  Chr17_8 Forward Primer
gaggccagctcagcatttta

SEQ ID NO: 16361 - DNA, 20 bp, Artificial Sequence
  Chr17_8 Forward Primer
cccaccaaaacgcattagtc

SEQ ID NO: 16362 - DNA, 20 bp, Artificial Sequence
  Chr17_8 Forward Primer
ttcttcacagttacccgcag

SEQ ID NO: 16363 - DNA, 20 bp, Artificial Sequence
  Chr17_8 Forward Primer
ggatgtcagtggtgtgttcg

SEQ ID NO: 16364 - DNA, 20 bp, Artificial Sequence
  Chr17_8 Forward Primer
aatgtcagctgtcaccatgc

SEQ ID NO: 16365 - DNA, 20 bp, Artificial Sequence
  Chr17_8 Forward Primer
cagtcacccccaagtcctta

SEQ ID NO: 16366 - DNA, 20 bp, Artificial Sequence
  Chr17_8 Forward Primer
ttcagccctctagcttcctg

SEQ ID NO: 16367 - DNA, 20 bp, Artificial Sequence
  Chr17_8 Forward Primer
gctgtgaagatgcctgtgaa

SEQ ID NO: 16368 - DNA, 20 bp, Artificial Sequence
  Chr17_8 Forward Primer
gcattccacacatgagcagt

SEQ ID NO: 16369 - DNA, 20 bp, Artificial Sequence
  Chr17_8 Forward Primer
atgggatctgaggattgcac

SEQ ID NO: 16370 - DNA, 20 bp, Artificial Sequence
  Chr17_8 Forward Primer
gagcccagggtttgattctc

SEQ ID NO: 16371 - DNA, 20 bp, Artificial Sequence
  Chr17_8 Forward Primer
taatgctcctaatgggcctg

SEQ ID NO: 16372 - DNA, 20 bp, Artificial Sequence
  Chr17_8 Forward Primer
cagatccccaagaatctgga

SEQ ID NO: 16373 - DNA, 20 bp, Artificial Sequence
  Chr17_8 Forward Primer
acccttactgtcacctcccc

SEQ ID NO: 16374 - DNA, 20 bp, Artificial Sequence
  Chr17_8 Forward Primer
cctcttgactcaccccacaa

SEQ ID NO: 16375 - DNA, 20 bp, Artificial Sequence
  Chr17_8 Forward Primer
acagggattggggagtctgt

SEQ ID NO: 16376 - DNA, 20 bp, Artificial Sequence
  Chr17_8 Forward Primer
ggcctgtagaccagcaagag

SEQ ID NO: 16377 - DNA, 20 bp, Artificial Sequence
  Chr17_8 Forward Primer
ctcaaaacccctacccctgt

SEQ ID NO: 16378 - DNA, 20 bp, Artificial Sequence
  Chr17_8 Forward Primer
cagggcagtgcctaggaata

SEQ ID NO: 16379 - DNA, 20 bp, Artificial Sequence
  Chr17_8 Forward Primer
tcccttagcatcactcaccc

SEQ ID NO: 16380 - DNA, 20 bp, Artificial Sequence
  Chr17_8 Forward Primer
tatgtccaggctttgctgtg

SEQ ID NO: 16381 - DNA, 20 bp, Artificial Sequence
  Chr17_8 Forward Primer
gagtggggatggcaaagata

SEQ ID NO: 16382 - DNA, 20 bp, Artificial Sequence
  Chr17_8 Forward Primer
tgacactgaagtccagccag

SEQ ID NO: 16383 - DNA, 20 bp, Artificial Sequence
  Chr17_8 Forward Primer
acaagagcagcaccacacag

SEQ ID NO: 16384 - DNA, 20 bp, Artificial Sequence
  Chr17_8 Forward Primer
agggtgcacagagatggtct

SEQ ID NO: 16385 - DNA, 20 bp, Artificial Sequence
  Chr17_8 Forward Primer
cacactttccccagaagtgg

SEQ ID NO: 16386 - DNA, 20 bp, Artificial Sequence
  Chr17_8 Forward Primer
ctgggagaggaacattgcat

SEQ ID NO: 16387 - DNA, 20 bp, Artificial Sequence
  Chr17_8 Forward Primer
gacagacccctagagacccc

SEQ ID NO: 16388 - DNA, 20 bp, Artificial Sequence
  Chr17_8 Forward Primer
atcagatccctgcctcattg

SEQ ID NO: 16389 - DNA, 20 bp, Artificial Sequence
  Chr17_8 Forward Primer
tggaactctccccttgtttg

SEQ ID NO: 16390 - DNA, 20 bp, Artificial Sequence
  Chr17_8 Forward Primer
cctttccacctgcttctgac

SEQ ID NO: 16391 - DNA, 20 bp, Artificial Sequence
  Chr17_8 Forward Primer
aggctgagctcaccgtaaat

SEQ ID NO: 16392 - DNA, 20 bp, Artificial Sequence
  Chr17_8 Forward Primer
cacagaaccatctccccatc

SEQ ID NO: 16393 - DNA, 20 bp, Artificial Sequence
  Chr17_8 Reverse Primer
aagtcagaatgtgaagcccc

SEQ ID NO: 16394 - DNA, 20 bp, Artificial Sequence
  Chr17_8 Reverse Primer
atccctgttgggactctgtg

SEQ ID NO: 16395 - DNA, 20 bp, Artificial Sequence
  Chr17_8 Reverse Primer
ctgcctcctgcctatgtctc

SEQ ID NO: 16396 - DNA, 20 bp, Artificial Sequence
  Chr17_8 Reverse Primer
aggaagcagcaaaaccttca

SEQ ID NO: 16397 - DNA, 20 bp, Artificial Sequence
  Chr17_8 Reverse Primer
cctcatccagcctcagagat

SEQ ID NO: 16398 - DNA, 20 bp, Artificial Sequence
  Chr17_8 Reverse Primer
tgaaacctcttcctaggcca

SEQ ID NO: 16399 - DNA, 20 bp, Artificial Sequence
  Chr17_8 Reverse Primer
cccccatcaccagagtctta

SEQ ID NO: 16400 - DNA, 20 bp, Artificial Sequence
  Chr17_8 Reverse Primer
ctgcacacagagtgagggag

SEQ ID NO: 16401 - DNA, 20 bp, Artificial Sequence
  Chr17_8 Reverse Primer
aaacccagcacccctactct

SEQ ID NO: 16402 - DNA, 20 bp, Artificial Sequence
  Chr17_8 Reverse Primer
cagtctgcagtggtcaggtg

SEQ ID NO: 16403 - DNA, 20 bp, Artificial Sequence
  Chr17_8 Reverse Primer
gggcaagaaaaatgggactt

SEQ ID NO: 16404 - DNA, 20 bp, Artificial Sequence
  Chr17_8 Reverse Primer
tgggtggtttatgagtgggt

SEQ ID NO: 16405 - DNA, 20 bp, Artificial Sequence
  Chr17_8 Reverse Primer
ggtggagggtgcatgtctat

SEQ ID NO: 16406 - DNA, 20 bp, Artificial Sequence
  Chr17_8 Reverse Primer
ctccatcttcagggagcaag

SEQ ID NO: 16407 - DNA, 20 bp, Artificial Sequence
  Chr17_8 Reverse Primer
gaggagtgcttcactgaggg

SEQ ID NO: 16408 - DNA, 20 bp, Artificial Sequence
  Chr17_8 Reverse Primer
tgtgtcctcatgcccttacc

SEQ ID NO: 16409 - DNA, 20 bp, Artificial Sequence
  Chr17_8 Reverse Primer
tggttttctggtcaccactc

SEQ ID NO: 16410 - DNA, 20 bp, Artificial Sequence
  Chr17_8 Reverse Primer
aaatacccaggcaactgtgg

SEQ ID NO: 16411 - DNA, 20 bp, Artificial Sequence
  Chr17_8 Reverse Primer
gtcgaggaagggacaggaac

SEQ ID NO: 16412 - DNA, 20 bp, Artificial Sequence
  Chr17_8 Reverse Primer
aggacatcatgctcagcctc

SEQ ID NO: 16413 - DNA, 20 bp, Artificial Sequence
  Chr17_8 Reverse Primer
ggtcagatgtcccttccaga

SEQ ID NO: 16414 - DNA, 20 bp, Artificial Sequence
  Chr17_8 Reverse Primer
gccaggcagactggtagaag

SEQ ID NO: 16415 - DNA, 20 bp, Artificial Sequence
  Chr17_8 Reverse Primer
taacccaaagcacagaaccc

SEQ ID NO: 16416 - DNA, 20 bp, Artificial Sequence
  Chr17_8 Reverse Primer
tctcccagtttgctcagagg

SEQ ID NO: 16417 - DNA, 20 bp, Artificial Sequence
  Chr17_8 Reverse Primer
atttcacctcatcctcacgc

SEQ ID NO: 16418 - DNA, 20 bp, Artificial Sequence
  Chr17_8 Reverse Primer
ggcattgcccctaattctct

SEQ ID NO: 16419 - DNA, 20 bp, Artificial Sequence
  Chr17_8 Reverse Primer
gtgtcacctcagctgcagaa

SEQ ID NO: 16420 - DNA, 20 bp, Artificial Sequence
  Chr17_8 Reverse Primer
tccagcagggttggaatatc

SEQ ID NO: 16421 - DNA, 20 bp, Artificial Sequence
  Chr17_8 Reverse Primer
tatgacttggcctttgcctc

SEQ ID NO: 16422 - DNA, 20 bp, Artificial Sequence
  Chr17_8 Reverse Primer
attttgctccttttggtccc

SEQ ID NO: 16423 - DNA, 18 bp, Artificial Sequence
  Chr17_8 Reverse Primer
cacagctgctgggatgtg

SEQ ID NO: 16424 - DNA, 20 bp, Artificial Sequence
  Chr17_8 Reverse Primer
aggagcctgacaaagggaaa

SEQ ID NO: 16425 - DNA, 20 bp, Artificial Sequence
  Chr17_8 Reverse Primer
agttgtcatgggcctgaaag

SEQ ID NO: 16426 - DNA, 20 bp, Artificial Sequence
  Chr17_8 Reverse Primer
tggagctgtctggctgtatg

SEQ ID NO: 16427 - DNA, 20 bp, Artificial Sequence
  Chr17_8 Reverse Primer
tgagtggtggtggaacttga

SEQ ID NO: 16428 - DNA, 20 bp, Artificial Sequence
  Chr17_8 Reverse Primer
tgtgcagagttgcactagcc

SEQ ID NO: 16429 - DNA, 20 bp, Artificial Sequence
  Chr17_8 Reverse Primer
agttctagctgcaaggccag

SEQ ID NO: 16430 - DNA, 20 bp, Artificial Sequence
  Chr17_8 Reverse Primer
ttcagggcagagggtcttta

SEQ ID NO: 16431 - DNA, 20 bp, Artificial Sequence
  Chr17_8 Reverse Primer
ggccgaggataaggagaaag

SEQ ID NO: 16432 - DNA, 20 bp, Artificial Sequence
  Chr17_8 Reverse Primer
tggaaggtgggagctgatta

SEQ ID NO: 16433 - DNA, 20 bp, Artificial Sequence
  Chr17_8 Reverse Primer
gggaacatccgtttggttta

SEQ ID NO: 16434 - DNA, 20 bp, Artificial Sequence
  Chr17_8 Reverse Primer
agtttgtggacttgggcaac

SEQ ID NO: 16435 - DNA, 20 bp, Artificial Sequence
  Chr17_8 Reverse Primer
ccaggccttaaagagggaag

SEQ ID NO: 16436 - DNA, 20 bp, Artificial Sequence
  Chr17_8 Reverse Primer
ttcatttctgtgtccctccc

SEQ ID NO: 16437 - DNA, 20 bp, Artificial Sequence
  Chr17_8 Reverse Primer
ctcactttccttgaccctgc

SEQ ID NO: 16438 - DNA, 20 bp, Artificial Sequence
  Chr17_8 Reverse Primer
gcacatctcccagtcctgat

SEQ ID NO: 16439 - DNA, 20 bp, Artificial Sequence
  Chr17_8 Reverse Primer
ctatccagaggtcgcctgag

SEQ ID NO: 16440 - DNA, 20 bp, Artificial Sequence
  Chr17_8 Reverse Primer
gaccacacaatgctcacagg

SEQ ID NO: 16441 - DNA, 20 bp, Artificial Sequence
  Chr17_8 Reverse Primer
ctgtaaggagcagctgggag

SEQ ID NO: 16442 - DNA, 20 bp, Artificial Sequence
  Chr17_8 Reverse Primer
aggaggtggttcttgtgtgg

SEQ ID NO: 16443 - DNA, 20 bp, Artificial Sequence
  Chr17_8 Reverse Primer
ctgagccaggagctgagaag

SEQ ID NO: 16444 - DNA, 20 bp, Artificial Sequence
  Chr17_8 Reverse Primer
atttccccagccacatttct

SEQ ID NO: 16445 - DNA, 23 bp, Artificial Sequence
  Chr17_8 Reverse Primer
tgtgtgtgtagtggttcttcctt

SEQ ID NO: 16446 - DNA, 20 bp, Artificial Sequence
  Chr17_8 Reverse Primer
tgtcaccactgccattgttt

SEQ ID NO: 16447 - DNA, 20 bp, Artificial Sequence
  Chr17_9 Forward Primer
catcttccaagactgtcgca

SEQ ID NO: 16448 - DNA, 20 bp, Artificial Sequence
  Chr17_9 Forward Primer
ggagggagggcctagtgtat

SEQ ID NO: 16449 - DNA, 20 bp, Artificial Sequence
  Chr17_9 Forward Primer
caaaggccttcttgccttct

SEQ ID NO: 16450 - DNA, 20 bp, Artificial Sequence
  Chr17_9 Forward Primer
ctgtggtgctgtaggaagca

SEQ ID NO: 16451 - DNA, 20 bp, Artificial Sequence
  Chr17_9 Forward Primer
tgggaaatgttgaagtgctg

SEQ ID NO: 16452 - DNA, 20 bp, Artificial Sequence
  Chr17_9 Forward Primer
ggcgagcagacactgaatct

SEQ ID NO: 16453 - DNA, 20 bp, Artificial Sequence
  Chr17_9 Forward Primer
ggacaatcctggcaagacat

SEQ ID NO: 16454 - DNA, 20 bp, Artificial Sequence
  Chr17_9 Forward Primer
tggcttggattggcttttta

SEQ ID NO: 16455 - DNA, 20 bp, Artificial Sequence
  Chr17_9 Forward Primer
ccatctgcccagtctttgtt

SEQ ID NO: 16456 - DNA, 20 bp, Artificial Sequence
  Chr17_9 Forward Primer
ggtaggattcctgctctccc

SEQ ID NO: 16457 - DNA, 20 bp, Artificial Sequence
  Chr17_9 Forward Primer
cactgcctgacatgctgaat

SEQ ID NO: 16458 - DNA, 20 bp, Artificial Sequence
  Chr17_9 Forward Primer
tcccctgtcctcattctgtc

SEQ ID NO: 16459 - DNA, 20 bp, Artificial Sequence
  Chr17_9 Forward Primer
agaaatcccagcacatagcg

SEQ ID NO: 16460 - DNA, 20 bp, Artificial Sequence
  Chr17_9 Forward Primer
cgtaccctgagttccgtgat

SEQ ID NO: 16461 - DNA, 20 bp, Artificial Sequence
  Chr17_9 Forward Primer
gcacgaatgatgcagacaac

SEQ ID NO: 16462 - DNA, 20 bp, Artificial Sequence
  Chr17_9 Forward Primer
gccagtcacatttcaaaggg

SEQ ID NO: 16463 - DNA, 20 bp, Artificial Sequence
  Chr17_9 Forward Primer
ctggcctgaacccattctta

SEQ ID NO: 16464 - DNA, 20 bp, Artificial Sequence
  Chr17_9 Forward Primer
gctcctggaaaatcatctgg

SEQ ID NO: 16465 - DNA, 20 bp, Artificial Sequence
  Chr17_9 Forward Primer
ttaggcacattgtcagccct

SEQ ID NO: 16466 - DNA, 20 bp, Artificial Sequence
  Chr17_9 Forward Primer
cagtatcaacccctccgtca

SEQ ID NO: 16467 - DNA, 20 bp, Artificial Sequence
  Chr17_9 Forward Primer
ctttctcgtgggggtaaaca

SEQ ID NO: 16468 - DNA, 20 bp, Artificial Sequence
  Chr17_9 Forward Primer
tgcctatctaggctgggaga

SEQ ID NO: 16469 - DNA, 20 bp, Artificial Sequence
  Chr17_9 Forward Primer
tgcaccttacaagcatgtcc

SEQ ID NO: 16470 - DNA, 20 bp, Artificial Sequence
  Chr17_9 Forward Primer
ctggtctctgacttgggctc

SEQ ID NO: 16471 - DNA, 20 bp, Artificial Sequence
  Chr17_9 Forward Primer
ccgtgtggggagaaatacac

SEQ ID NO: 16472 - DNA, 20 bp, Artificial Sequence
  Chr17_9 Forward Primer
ctaattacaggagcggctgg

SEQ ID NO: 16473 - DNA, 20 bp, Artificial Sequence
  Chr17_9 Forward Primer
ccaggtaaaaggaaccccat

SEQ ID NO: 16474 - DNA, 20 bp, Artificial Sequence
  Chr17_9 Forward Primer
cagaatagaacggctggcat

SEQ ID NO: 16475 - DNA, 20 bp, Artificial Sequence
  Chr17_9 Forward Primer
tccccgtcgtttatgatgta

SEQ ID NO: 16476 - DNA, 20 bp, Artificial Sequence
  Chr17_9 Forward Primer
attatgatgtgggccgattc

SEQ ID NO: 16477 - DNA, 20 bp, Artificial Sequence
  Chr17_9 Forward Primer
ctgaaccgaccggactagag

SEQ ID NO: 16478 - DNA, 20 bp, Artificial Sequence
  Chr17_9 Forward Primer
gactgctgtgctgtgattgg

SEQ ID NO: 16479 - DNA, 20 bp, Artificial Sequence
  Chr17_9 Forward Primer
acacacacaccccaactcaa

SEQ ID NO: 16480 - DNA, 20 bp, Artificial Sequence
  Chr17_9 Forward Primer
gcccttgttgattttctcgt

SEQ ID NO: 16481 - DNA, 20 bp, Artificial Sequence
  Chr17_9 Forward Primer
tacgactacaccgaccacca

SEQ ID NO: 16482 - DNA, 20 bp, Artificial Sequence
  Chr17_9 Forward Primer
tctgcctgtttggactttgt

SEQ ID NO: 16483 - DNA, 22 bp, Artificial Sequence
  Chr17_9 Forward Primer
tgttatgtgatcagttttgggg

SEQ ID NO: 16484 - DNA, 20 bp, Artificial Sequence
  Chr17_9 Forward Primer
tcttggagtgagggaggcta

SEQ ID NO: 16485 - DNA, 20 bp, Artificial Sequence
  Chr17_9 Forward Primer
agggaaccagagagaagcct

SEQ ID NO: 16486 - DNA, 20 bp, Artificial Sequence
  Chr17_9 Forward Primer
agagtccaacctctctggca

SEQ ID NO: 16487 - DNA, 20 bp, Artificial Sequence
  Chr17_9 Forward Primer
acaggagtgctgggagagaa

SEQ ID NO: 16488 - DNA, 20 bp, Artificial Sequence
  Chr17_9 Forward Primer
ttagagccatggggattcac

SEQ ID NO: 16489 - DNA, 20 bp, Artificial Sequence
  Chr17_9 Forward Primer
ctccccttgactctgacagc

SEQ ID NO: 16490 - DNA, 20 bp, Artificial Sequence
  Chr17_9 Forward Primer
ccactcctcattcttgccat

SEQ ID NO: 16491 - DNA, 21 bp, Artificial Sequence
  Chr17_9 Forward Primer
ccaagagaaaaatccagtccc

SEQ ID NO: 16492 - DNA, 20 bp, Artificial Sequence
  Chr17_9 Forward Primer
gagacaggagccaacaaagc

SEQ ID NO: 16493 - DNA, 20 bp, Artificial Sequence
  Chr17_9 Forward Primer
ctggccgcttatgttttgtt

SEQ ID NO: 16494 - DNA, 20 bp, Artificial Sequence
  Chr17_9 Forward Primer
tgacccaggcagatacatca

SEQ ID NO: 16495 - DNA, 20 bp, Artificial Sequence
  Chr17_9 Forward Primer
cctgcctcagcactgtatga

SEQ ID NO: 16496 - DNA, 20 bp, Artificial Sequence
  Chr17_9 Forward Primer
gaactgtgaggagctgaccc

SEQ ID NO: 16497 - DNA, 20 bp, Artificial Sequence
  Chr17_9 Forward Primer
tctggctagagaccagagcc

SEQ ID NO: 16498 - DNA, 20 bp, Artificial Sequence
  Chr17_9 Forward Primer
gctgctgactttatgtgcca

SEQ ID NO: 16499 - DNA, 20 bp, Artificial Sequence
  Chr17_9 Forward Primer
gatacccaacgagctgagga

SEQ ID NO: 16500 - DNA, 20 bp, Artificial Sequence
  Chr17_9 Forward Primer
gtatggccccaagttcaaag

SEQ ID NO: 16501 - DNA, 20 bp, Artificial Sequence
  Chr17_9 Reverse Primer
tgtcacttccaagccatctg

SEQ ID NO: 16502 - DNA, 20 bp, Artificial Sequence
  Chr17_9 Reverse Primer
ggagagttgcttggcttgac

SEQ ID NO: 16503 - DNA, 20 bp, Artificial Sequence
  Chr17_9 Reverse Primer
cacatgtttcccacaacagg

SEQ ID NO: 16504 - DNA, 20 bp, Artificial Sequence
  Chr17_9 Reverse Primer
atggtgtgtagaaggccagg

SEQ ID NO: 16505 - DNA, 20 bp, Artificial Sequence
  Chr17_9 Reverse Primer
gggatgaaccagtctggaaa

SEQ ID NO: 16506 - DNA, 21 bp, Artificial Sequence
  Chr17_9 Reverse Primer
ggttccaaggtctctggactt

SEQ ID NO: 16507 - DNA, 20 bp, Artificial Sequence
  Chr17_9 Reverse Primer
aaagtctggcctagcgtgaa

SEQ ID NO: 16508 - DNA, 21 bp, Artificial Sequence
  Chr17_9 Reverse Primer
tcaggagtgccttagaccaaa

SEQ ID NO: 16509 - DNA, 20 bp, Artificial Sequence
  Chr17_9 Reverse Primer
tgtttcacaagtgggctctg

SEQ ID NO: 16510 - DNA, 20 bp, Artificial Sequence
  Chr17_9 Reverse Primer
gctgcacacaagtccacact

SEQ ID NO: 16511 - DNA, 20 bp, Artificial Sequence
  Chr17_9 Reverse Primer
ggagggcaagaacaatgaaa

SEQ ID NO: 16512 - DNA, 20 bp, Artificial Sequence
  Chr17_9 Reverse Primer
agggttagggttccctgagt

SEQ ID NO: 16513 - DNA, 20 bp, Artificial Sequence
  Chr17_9 Reverse Primer
cctaatcagggtttggctga

SEQ ID NO: 16514 - DNA, 20 bp, Artificial Sequence
  Chr17_9 Reverse Primer
tctctaggaggctgtgaggg

SEQ ID NO: 16515 - DNA, 20 bp, Artificial Sequence
  Chr17_9 Reverse Primer
ggaattagcgggtgtcatgt

SEQ ID NO: 16516 - DNA, 20 bp, Artificial Sequence
  Chr17_9 Reverse Primer
cctcgaggaaaagcacgtag

SEQ ID NO: 16517 - DNA, 21 bp, Artificial Sequence
  Chr17_9 Reverse Primer
gcctacttcagccaactcttg

SEQ ID NO: 16518 - DNA, 20 bp, Artificial Sequence
  Chr17_9 Reverse Primer
ggcagactcagtcccatctc

SEQ ID NO: 16519 - DNA, 20 bp, Artificial Sequence
  Chr17_9 Reverse Primer
ggaatggggtggctacatct

SEQ ID NO: 16520 - DNA, 20 bp, Artificial Sequence
  Chr17_9 Reverse Primer
cacaggcaaagcagagacag

SEQ ID NO: 16521 - DNA, 20 bp, Artificial Sequence
  Chr17_9 Reverse Primer
caaggccctttctctcactg

SEQ ID NO: 16522 - DNA, 20 bp, Artificial Sequence
  Chr17_9 Reverse Primer
caaaaagtgcttggggtagg

SEQ ID NO: 16523 - DNA, 20 bp, Artificial Sequence
  Chr17_9 Reverse Primer
tcaggtaccgaccaaagagg

SEQ ID NO: 16524 - DNA, 20 bp, Artificial Sequence
  Chr17_9 Reverse Primer
ctccgctaaaactgcagacc

SEQ ID NO: 16525 - DNA, 20 bp, Artificial Sequence
  Chr17_9 Reverse Primer
acagcaacagctaaggggaa

SEQ ID NO: 16526 - DNA, 20 bp, Artificial Sequence
  Chr17_9 Reverse Primer
tagggaaagtttggtggggt

SEQ ID NO: 16527 - DNA, 20 bp, Artificial Sequence
  Chr17_9 Reverse Primer
gaaaccgaggtctgggatct

SEQ ID NO: 16528 - DNA, 20 bp, Artificial Sequence
  Chr17_9 Reverse Primer
gaaaacttggatggtggtgg

SEQ ID NO: 16529 - DNA, 20 bp, Artificial Sequence
  Chr17_9 Reverse Primer
ggcagacattttagccaggt

SEQ ID NO: 16530 - DNA, 20 bp, Artificial Sequence
  Chr17_9 Reverse Primer
tgggtaagtgcggagctatc

SEQ ID NO: 16531 - DNA, 20 bp, Artificial Sequence
  Chr17_9 Reverse Primer
atagaagtttgccaatgcgg

SEQ ID NO: 16532 - DNA, 20 bp, Artificial Sequence
  Chr17_9 Reverse Primer
aggggaggaaaaagagcaaa

SEQ ID NO: 16533 - DNA, 20 bp, Artificial Sequence
  Chr17_9 Reverse Primer
actggacagcccccttttat

SEQ ID NO: 16534 - DNA, 20 bp, Artificial Sequence
  Chr17_9 Reverse Primer
tctcgatgttggagatgacg

SEQ ID NO: 16535 - DNA, 20 bp, Artificial Sequence
  Chr17_9 Reverse Primer
ctcctcaaggtcgagtgagc

SEQ ID NO: 16536 - DNA, 20 bp, Artificial Sequence
  Chr17_9 Reverse Primer
gcaagaaaagctagggcaca

SEQ ID NO: 16537 - DNA, 20 bp, Artificial Sequence
  Chr17_9 Reverse Primer
gcaccgttttaaggctcaag

SEQ ID NO: 16538 - DNA, 20 bp, Artificial Sequence
  Chr17_9 Reverse Primer
acagaaattgaaggatgcca

SEQ ID NO: 16539 - DNA, 20 bp, Artificial Sequence
  Chr17_9 Reverse Primer
aacctggaaactccccatct

SEQ ID NO: 16540 - DNA, 20 bp, Artificial Sequence
  Chr17_9 Reverse Primer
gtctgaaggggtagggaagg

SEQ ID NO: 16541 - DNA, 20 bp, Artificial Sequence
  Chr17_9 Reverse Primer
acaaactctttccggtgtgg

SEQ ID NO: 16542 - DNA, 20 bp, Artificial Sequence
  Chr17_9 Reverse Primer
aaaggagcctgtgcttttga

SEQ ID NO: 16543 - DNA, 20 bp, Artificial Sequence
  Chr17_9 Reverse Primer
cctgaatgctcaagggacat

SEQ ID NO: 16544 - DNA, 20 bp, Artificial Sequence
  Chr17_9 Reverse Primer
tcaactcctccttccctgtg

SEQ ID NO: 16545 - DNA, 20 bp, Artificial Sequence
  Chr17_9 Reverse Primer
tattctggaggcaatggagg

SEQ ID NO: 16546 - DNA, 20 bp, Artificial Sequence
  Chr17_9 Reverse Primer
caaaggccctgaaatagcaa

SEQ ID NO: 16547 - DNA, 20 bp, Artificial Sequence
  Chr17_9 Reverse Primer
gcagccaactagtgggagag

SEQ ID NO: 16548 - DNA, 20 bp, Artificial Sequence
  Chr17_9 Reverse Primer
gggtgagggagggatatgtt

SEQ ID NO: 16549 - DNA, 20 bp, Artificial Sequence
  Chr17_9 Reverse Primer
atttgggctttgactttccc

SEQ ID NO: 16550 - DNA, 20 bp, Artificial Sequence
  Chr17_9 Reverse Primer
aagagggaaaatgaggaccc

SEQ ID NO: 16551 - DNA, 20 bp, Artificial Sequence
  Chr17_9 Reverse Primer
actaggtgtggggtccctct

SEQ ID NO: 16552 - DNA, 20 bp, Artificial Sequence
  Chr17_9 Reverse Primer
tcctccctcttcactctcca

SEQ ID NO: 16553 - DNA, 20 bp, Artificial Sequence
  Chr17_9 Reverse Primer
gtgcatgtgtgagctttgct

SEQ ID NO: 16554 - DNA, 20 bp, Artificial Sequence
  Chr17_9 Reverse Primer
aatggcaccaactgtagcct

SEQ ID NO: 16555 - DNA, 18 bp, Artificial Sequence
  Chr17_10 Forward Primer
ctagcaacgggaaatggc

SEQ ID NO: 16556 - DNA, 20 bp, Artificial Sequence
  Chr17_10 Forward Primer
ccttctcacttctcccctcc

SEQ ID NO: 16557 - DNA, 20 bp, Artificial Sequence
  Chr17_10 Forward Primer
cggcctcctcttccatattt

SEQ ID NO: 16558 - DNA, 20 bp, Artificial Sequence
  Chr17_10 Forward Primer
ttgttgctctgtaaacccga

SEQ ID NO: 16559 - DNA, 20 bp, Artificial Sequence
  Chr17_10 Forward Primer
agcaagactctgtctgggga

SEQ ID NO: 16560 - DNA, 20 bp, Artificial Sequence
  Chr17_10 Forward Primer
aaggggaaaaggcagatgtt

SEQ ID NO: 16561 - DNA, 20 bp, Artificial Sequence
  Chr17_10 Forward Primer
aagaatcccaagcagaagca

SEQ ID NO: 16562 - DNA, 20 bp, Artificial Sequence
  Chr17_10 Forward Primer
tcatcccagagtgtgcagag

SEQ ID NO: 16563 - DNA, 20 bp, Artificial Sequence
  Chr17_10 Forward Primer
gtccaggagaacagatgcgt

SEQ ID NO: 16564 - DNA, 20 bp, Artificial Sequence
  Chr17_10 Forward Primer
tccacaaacaagcctgaaaa

SEQ ID NO: 16565 - DNA, 21 bp, Artificial Sequence
  Chr17_10 Forward Primer
catcatccatcccaaagtagg

SEQ ID NO: 16566 - DNA, 20 bp, Artificial Sequence
  Chr17_10 Forward Primer
ggaagctgctgcctcttcta

SEQ ID NO: 16567 - DNA, 20 bp, Artificial Sequence
  Chr17_10 Forward Primer
caagtggtaaagaaggccga

SEQ ID NO: 16568 - DNA, 20 bp, Artificial Sequence
  Chr17_10 Forward Primer
cctgtttcccaggacctgta

SEQ ID NO: 16569 - DNA, 20 bp, Artificial Sequence
  Chr17_10 Forward Primer
cctaggctgcccaataatcc

SEQ ID NO: 16570 - DNA, 20 bp, Artificial Sequence
  Chr17_10 Forward Primer
ggacttggcgttctacagga

SEQ ID NO: 16571 - DNA, 20 bp, Artificial Sequence
  Chr17_10 Forward Primer
ctcctcattcccaagcactg

SEQ ID NO: 16572 - DNA, 19 bp, Artificial Sequence
  Chr17_10 Forward Primer
ccatcagcgtggagaagag

SEQ ID NO: 16573 - DNA, 20 bp, Artificial Sequence
  Chr17_10 Forward Primer
aaatcctttccaacactgcg

SEQ ID NO: 16574 - DNA, 20 bp, Artificial Sequence
  Chr17_10 Forward Primer
tgggtgtctttttcctcctg

SEQ ID NO: 16575 - DNA, 20 bp, Artificial Sequence
  Chr17_10 Forward Primer
cctgcctaacttgtgtgcaa

SEQ ID NO: 16576 - DNA, 20 bp, Artificial Sequence
  Chr17_10 Forward Primer
tgctgtttgcacccagatag

SEQ ID NO: 16577 - DNA, 20 bp, Artificial Sequence
  Chr17_10 Forward Primer
atttctggagccttcaccct

SEQ ID NO: 16578 - DNA, 20 bp, Artificial Sequence
  Chr17_10 Forward Primer
gtcctgaaggaaccgtgtgt

SEQ ID NO: 16579 - DNA, 20 bp, Artificial Sequence
  Chr17_10 Forward Primer
ttagtgagctccctcgtgtg

SEQ ID NO: 16580 - DNA, 19 bp, Artificial Sequence
  Chr17_10 Forward Primer
gacacagaggatgccctca

SEQ ID NO: 16581 - DNA, 20 bp, Artificial Sequence
  Chr17_10 Forward Primer
gcacatgacctccaacaaga

SEQ ID NO: 16582 - DNA, 20 bp, Artificial Sequence
  Chr17_10 Forward Primer
ctaccacaggctccaccatt

SEQ ID NO: 16583 - DNA, 20 bp, Artificial Sequence
  Chr17_10 Forward Primer
agcccgataggtcatacgtg

SEQ ID NO: 16584 - DNA, 20 bp, Artificial Sequence
  Chr17_10 Forward Primer
ggtccaggcagttaatccag

SEQ ID NO: 16585 - DNA, 20 bp, Artificial Sequence
  Chr17_10 Forward Primer
gctgacattgccacacaact

SEQ ID NO: 16586 - DNA, 19 bp, Artificial Sequence
  Chr17_10 Forward Primer
gtgctcagggcagacacag

SEQ ID NO: 16587 - DNA, 20 bp, Artificial Sequence
  Chr17_10 Forward Primer
aagtaggtcccttgctgggt

SEQ ID NO: 16588 - DNA, 20 bp, Artificial Sequence
  Chr17_10 Forward Primer
ctgatcgagaggaagcaagg

SEQ ID NO: 16589 - DNA, 20 bp, Artificial Sequence
  Chr17_10 Forward Primer
tcaaggtgacacaggagcag

SEQ ID NO: 16590 - DNA, 21 bp, Artificial Sequence
  Chr17_10 Forward Primer
gggttgagaaatgtcacgaaa

SEQ ID NO: 16591 - DNA, 20 bp, Artificial Sequence
  Chr17_10 Forward Primer
cttcctggaccactctccac

SEQ ID NO: 16592 - DNA, 20 bp, Artificial Sequence
  Chr17_10 Forward Primer
tcagctgagtatcggtgtcc

SEQ ID NO: 16593 - DNA, 20 bp, Artificial Sequence
  Chr17_10 Forward Primer
tgttgttttctgcccctacc

SEQ ID NO: 16594 - DNA, 20 bp, Artificial Sequence
  Chr17_10 Forward Primer
gtgcaaagtacccagggaaa

SEQ ID NO: 16595 - DNA, 20 bp, Artificial Sequence
  Chr17_10 Forward Primer
agagcctcacgctttctgtc

SEQ ID NO: 16596 - DNA, 20 bp, Artificial Sequence
  Chr17_10 Forward Primer
cgagatccacaggatgaagg

SEQ ID NO: 16597 - DNA, 20 bp, Artificial Sequence
  Chr17_10 Forward Primer
ctccatgtcccttgttcctc

SEQ ID NO: 16598 - DNA, 20 bp, Artificial Sequence
  Chr17_10 Forward Primer
gaccatccccagttctgcta

SEQ ID NO: 16599 - DNA, 19 bp, Artificial Sequence
  Chr17_10 Forward Primer
gaagaggccagctcatgct

SEQ ID NO: 16600 - DNA, 20 bp, Artificial Sequence
  Chr17_10 Forward Primer
tggaggggcagagttaaatg

SEQ ID NO: 16601 - DNA, 20 bp, Artificial Sequence
  Chr17_10 Forward Primer
ttggctactcctgatgtcca

SEQ ID NO: 16602 - DNA, 20 bp, Artificial Sequence
  Chr17_10 Forward Primer
catgtcagctgccaaacact

SEQ ID NO: 16603 - DNA, 20 bp, Artificial Sequence
  Chr17_10 Forward Primer
gccttaaaggagcagtgtgc

SEQ ID NO: 16604 - DNA, 20 bp, Artificial Sequence
  Chr17_10 Forward Primer
aagaagcgtcagggtcattg

SEQ ID NO: 16605 - DNA, 20 bp, Artificial Sequence
  Chr17_10 Forward Primer
cttttcaggcgtaggtctcg

SEQ ID NO: 16606 - DNA, 20 bp, Artificial Sequence
  Chr17_10 Forward Primer
acgagtacccccagttccag

SEQ ID NO: 16607 - DNA, 20 bp, Artificial Sequence
  Chr17_10 Forward Primer
ccccacccataggaatcttt

SEQ ID NO: 16608 - DNA, 18 bp, Artificial Sequence
  Chr17_10 Reverse Primer
gggaaaggccagcaaaat

SEQ ID NO: 16609 - DNA, 18 bp, Artificial Sequence
  Chr17_10 Reverse Primer
aaggtcaggggcggtatc

SEQ ID NO: 16610 - DNA, 20 bp, Artificial Sequence
  Chr17_10 Reverse Primer
cctcccttccatactcccat

SEQ ID NO: 16611 - DNA, 20 bp, Artificial Sequence
  Chr17_10 Reverse Primer
taatgagaggtttccgggtg

SEQ ID NO: 16612 - DNA, 20 bp, Artificial Sequence
  Chr17_10 Reverse Primer
acggtctgtgggtcagaaac

SEQ ID NO: 16613 - DNA, 20 bp, Artificial Sequence
  Chr17_10 Reverse Primer
ggcacctcatggtctcatct

SEQ ID NO: 16614 - DNA, 20 bp, Artificial Sequence
  Chr17_10 Reverse Primer
ggtccagcttcaacttttcg

SEQ ID NO: 16615 - DNA, 20 bp, Artificial Sequence
  Chr17_10 Reverse Primer
aggttcctcgaactggcttt

SEQ ID NO: 16616 - DNA, 19 bp, Artificial Sequence
  Chr17_10 Reverse Primer
tgatgaaagcgtagcccag

SEQ ID NO: 16617 - DNA, 20 bp, Artificial Sequence
  Chr17_10 Reverse Primer
attgccagataagccagcag

SEQ ID NO: 16618 - DNA, 22 bp, Artificial Sequence
  Chr17_10 Reverse Primer
tcattcccagatccatatctca

SEQ ID NO: 16619 - DNA, 20 bp, Artificial Sequence
  Chr17_10 Reverse Primer
tagtgccaggtggtaaggct

SEQ ID NO: 16620 - DNA, 20 bp, Artificial Sequence
  Chr17_10 Reverse Primer
ctgttctccaccaacccttg

SEQ ID NO: 16621 - DNA, 20 bp, Artificial Sequence
  Chr17_10 Reverse Primer
tagtagacccaccagcaccc

SEQ ID NO: 16622 - DNA, 20 bp, Artificial Sequence
  Chr17_10 Reverse Primer
gactgaaccacagtgcgcta

SEQ ID NO: 16623 - DNA, 20 bp, Artificial Sequence
  Chr17_10 Reverse Primer
acctccatgggtacaggagc

SEQ ID NO: 16624 - DNA, 20 bp, Artificial Sequence
  Chr17_10 Reverse Primer
gcaggaatggctgtctcatt

SEQ ID NO: 16625 - DNA, 20 bp, Artificial Sequence
  Chr17_10 Reverse Primer
accctctgtcccagagatcc

SEQ ID NO: 16626 - DNA, 20 bp, Artificial Sequence
  Chr17_10 Reverse Primer
taggatttcggttggaatgc

SEQ ID NO: 16627 - DNA, 20 bp, Artificial Sequence
  Chr17_10 Reverse Primer
gctggacaacaggaccatct

SEQ ID NO: 16628 - DNA, 20 bp, Artificial Sequence
  Chr17_10 Reverse Primer
cgtagaagtatcccagcgga

SEQ ID NO: 16629 - DNA, 20 bp, Artificial Sequence
  Chr17_10 Reverse Primer
gaccatcagccaggaatgtc

SEQ ID NO: 16630 - DNA, 20 bp, Artificial Sequence
  Chr17_10 Reverse Primer
gcattcggttctttggtgtt

SEQ ID NO: 16631 - DNA, 20 bp, Artificial Sequence
  Chr17_10 Reverse Primer
ctccaagttaagtgcggtcc

SEQ ID NO: 16632 - DNA, 20 bp, Artificial Sequence
  Chr17_10 Reverse Primer
agtgtggcttccgtctctgt

SEQ ID NO: 16633 - DNA, 19 bp, Artificial Sequence
  Chr17_10 Reverse Primer
agcatccgtcttcctcctg

SEQ ID NO: 16634 - DNA, 20 bp, Artificial Sequence
  Chr17_10 Reverse Primer
acctgaacaccatggaaagg

SEQ ID NO: 16635 - DNA, 20 bp, Artificial Sequence
  Chr17_10 Reverse Primer
ggaactggacttggctggta

SEQ ID NO: 16636 - DNA, 20 bp, Artificial Sequence
  Chr17_10 Reverse Primer
tttgctcctcctcccagata

SEQ ID NO: 16637 - DNA, 19 bp, Artificial Sequence
  Chr17_10 Reverse Primer
tgccaagttcaccctgaga

SEQ ID NO: 16638 - DNA, 20 bp, Artificial Sequence
  Chr17_10 Reverse Primer
ttggctctctcacgactgtg

SEQ ID NO: 16639 - DNA, 20 bp, Artificial Sequence
  Chr17_10 Reverse Primer
gactttggatcccttctggc

SEQ ID NO: 16640 - DNA, 20 bp, Artificial Sequence
  Chr17_10 Reverse Primer
tgtcaccgttgattttggaa

SEQ ID NO: 16641 - DNA, 20 bp, Artificial Sequence
  Chr17_10 Reverse Primer
aagcaggtagggaaagaggc

SEQ ID NO: 16642 - DNA, 20 bp, Artificial Sequence
  Chr17_10 Reverse Primer
ttttaaggctgcgtgcaaat

SEQ ID NO: 16643 - DNA, 20 bp, Artificial Sequence
  Chr17_10 Reverse Primer
ccggtggaatggttttctaa

SEQ ID NO: 16644 - DNA, 20 bp, Artificial Sequence
  Chr17_10 Reverse Primer
tgctactcaccaacagacgg

SEQ ID NO: 16645 - DNA, 19 bp, Artificial Sequence
  Chr17_10 Reverse Primer
aagaggccacagctggttc

SEQ ID NO: 16646 - DNA, 20 bp, Artificial Sequence
  Chr17_10 Reverse Primer
gaactgagaggacctgcctg

SEQ ID NO: 16647 - DNA, 20 bp, Artificial Sequence
  Chr17_10 Reverse Primer
tttccacagggagatatggg

SEQ ID NO: 16648 - DNA, 20 bp, Artificial Sequence
  Chr17_10 Reverse Primer
aatccactgaggaacgcatc

SEQ ID NO: 16649 - DNA, 20 bp, Artificial Sequence
  Chr17_10 Reverse Primer
gagtgcaggtcactctgctg

SEQ ID NO: 16650 - DNA, 20 bp, Artificial Sequence
  Chr17_10 Reverse Primer
atggcacggatcatcttctc

SEQ ID NO: 16651 - DNA, 19 bp, Artificial Sequence
  Chr17_10 Reverse Primer
acctccgatatgcagggag

SEQ ID NO: 16652 - DNA, 20 bp, Artificial Sequence
  Chr17_10 Reverse Primer
ccaacctgggaagtgtgagt

SEQ ID NO: 16653 - DNA, 20 bp, Artificial Sequence
  Chr17_10 Reverse Primer
gacttcagcactctccaggg

SEQ ID NO: 16654 - DNA, 20 bp, Artificial Sequence
  Chr17_10 Reverse Primer
aggacaaggacccatcagtg

SEQ ID NO: 16655 - DNA, 20 bp, Artificial Sequence
  Chr17_10 Reverse Primer
gagactggcacagttcagca

SEQ ID NO: 16656 - DNA, 20 bp, Artificial Sequence
  Chr17_10 Reverse Primer
ggtggcctaggagaatcaca

SEQ ID NO: 16657 - DNA, 20 bp, Artificial Sequence
  Chr17_10 Reverse Primer
cataccctaacctccccagc

SEQ ID NO: 16658 - DNA, 20 bp, Artificial Sequence
  Chr17_10 Reverse Primer
agcggaacaggaacacgtag

SEQ ID NO: 16659 - DNA, 20 bp, Artificial Sequence
  Chr17_10 Reverse Primer
gatgcccttctgagggtaca

SEQ ID NO: 16660 - DNA, 20 bp, Artificial Sequence
  Chr17_10 Reverse Primer
gttgtgttgtgagaggcacg

SEQ ID NO: 16661 - DNA, 20 bp, Artificial Sequence
  Chr18_1 Forward Primer
ggagcttgatctgggttctg

SEQ ID NO: 16662 - DNA, 20 bp, Artificial Sequence
  Chr18_1 Forward Primer
taaccccctcaaatgtttcg

SEQ ID NO: 16663 - DNA, 20 bp, Artificial Sequence
  Chr18_1 Forward Primer
tgtccattattatttggggg

SEQ ID NO: 16664 - DNA, 20 bp, Artificial Sequence
  Chr18_1 Forward Primer
cccaggctccaagtaagaga

SEQ ID NO: 16665 - DNA, 21 bp, Artificial Sequence
  Chr18_1 Forward Primer
tgtggacacaaaagcaaaact

SEQ ID NO: 16666 - DNA, 20 bp, Artificial Sequence
  Chr18_1 Forward Primer
atgcagctttcagcaagtca

SEQ ID NO: 16667 - DNA, 20 bp, Artificial Sequence
  Chr18_1 Forward Primer
aagcttcattttgtgccctg

SEQ ID NO: 16668 - DNA, 20 bp, Artificial Sequence
  Chr18_1 Forward Primer
gggcaatggaaagaaaaaca

SEQ ID NO: 16669 - DNA, 21 bp, Artificial Sequence
  Chr18_1 Forward Primer
aagtggcatcacacagacttg

SEQ ID NO: 16670 - DNA, 22 bp, Artificial Sequence
  Chr18_1 Forward Primer
acacacacacacacacacacaa

SEQ ID NO: 16671 - DNA, 20 bp, Artificial Sequence
  Chr18_1 Forward Primer
ctctctcagtgcagggttcc

SEQ ID NO: 16672 - DNA, 20 bp, Artificial Sequence
  Chr18_1 Forward Primer
ccatgtagtcactgggcaaa

SEQ ID NO: 16673 - DNA, 27 bp, Artificial Sequence
  Chr18_1 Forward Primer
gttagaaagatttcaaataatggattc

SEQ ID NO: 16674 - DNA, 20 bp, Artificial Sequence
  Chr18_1 Forward Primer
tccatcctgatgtaggaccc

SEQ ID NO: 16675 - DNA, 21 bp, Artificial Sequence
  Chr18_1 Forward Primer
gcagaggaaaaggactgatga

SEQ ID NO: 16676 - DNA, 20 bp, Artificial Sequence
  Chr18_1 Forward Primer
ggtgaacaggggtattgtgg

SEQ ID NO: 16677 - DNA, 20 bp, Artificial Sequence
  Chr18_1 Forward Primer
agccagggtgacatttgttc

SEQ ID NO: 16678 - DNA, 21 bp, Artificial Sequence
  Chr18_1 Forward Primer
ttgcattgctcctttttctgt

SEQ ID NO: 16679 - DNA, 22 bp, Artificial Sequence
  Chr18_1 Forward Primer
tttcttcaagcctttgatttct

SEQ ID NO: 16680 - DNA, 20 bp, Artificial Sequence
  Chr18_1 Forward Primer
aaccccttgggcttttatgt

SEQ ID NO: 16681 - DNA, 20 bp, Artificial Sequence
  Chr18_1 Forward Primer
gcaccacagggaagagatgt

SEQ ID NO: 16682 - DNA, 20 bp, Artificial Sequence
  Chr18_1 Forward Primer
atggcttgcctttgtggact

SEQ ID NO: 16683 - DNA, 20 bp, Artificial Sequence
  Chr18_1 Forward Primer
cagcctatcagcacgtttca

SEQ ID NO: 16684 - DNA, 21 bp, Artificial Sequence
  Chr18_1 Forward Primer
tctcaaccctggtttcacatc

SEQ ID NO: 16685 - DNA, 20 bp, Artificial Sequence
  Chr18_1 Forward Primer
attcctgcctaggcttctcc

SEQ ID NO: 16686 - DNA, 20 bp, Artificial Sequence
  Chr18_1 Forward Primer
gcaagcagcagattggtaga

SEQ ID NO: 16687 - DNA, 20 bp, Artificial Sequence
  Chr18_1 Forward Primer
ttgcattgtgttgttgggtt

SEQ ID NO: 16688 - DNA, 25 bp, Artificial Sequence
  Chr18_1 Forward Primer
ggtccatttaatacaaaataaggca

SEQ ID NO: 16689 - DNA, 20 bp, Artificial Sequence
  Chr18_1 Forward Primer
cactgaaatcctcacgggtt

SEQ ID NO: 16690 - DNA, 20 bp, Artificial Sequence
  Chr18_1 Forward Primer
ggaaggccagtaaccacaaa

SEQ ID NO: 16691 - DNA, 20 bp, Artificial Sequence
  Chr18_1 Forward Primer
gctcagccgtttactggaag

SEQ ID NO: 16692 - DNA, 21 bp, Artificial Sequence
  Chr18_1 Forward Primer
tcgcaaaacctgaaaaatgat

SEQ ID NO: 16693 - DNA, 22 bp, Artificial Sequence
  Chr18_1 Forward Primer
gccttcccttggattttaattt

SEQ ID NO: 16694 - DNA, 23 bp, Artificial Sequence
  Chr18_1 Forward Primer
gccatgatataaaaacaaatgcc

SEQ ID NO: 16695 - DNA, 20 bp, Artificial Sequence
  Chr18_1 Forward Primer
ctgaggtgtccagggtttgt

SEQ ID NO: 16696 - DNA, 20 bp, Artificial Sequence
  Chr18_1 Forward Primer
gcagggacagagcaaatgtt

SEQ ID NO: 16697 - DNA, 20 bp, Artificial Sequence
  Chr18_1 Forward Primer
catctttctgggcctcagtc

SEQ ID NO: 16698 - DNA, 18 bp, Artificial Sequence
  Chr18_1 Forward Primer
gagccactgtgcccagac

SEQ ID NO: 16699 - DNA, 20 bp, Artificial Sequence
  Chr18_1 Forward Primer
aatctgggaaaatggggaac

SEQ ID NO: 16700 - DNA, 20 bp, Artificial Sequence
  Chr18_1 Forward Primer
acaagggaacttgcttctgc

SEQ ID NO: 16701 - DNA, 20 bp, Artificial Sequence
  Chr18_1 Forward Primer
accttctcaacaaggcctga

SEQ ID NO: 16702 - DNA, 20 bp, Artificial Sequence
  Chr18_1 Forward Primer
cagccaccacactcaacatc

SEQ ID NO: 16703 - DNA, 20 bp, Artificial Sequence
  Chr18_1 Forward Primer
acataggggtaggtgagggg

SEQ ID NO: 16704 - DNA, 20 bp, Artificial Sequence
  Chr18_1 Forward Primer
caaaggaagcacaatgcaaa

SEQ ID NO: 16705 - DNA, 24 bp, Artificial Sequence
  Chr18_1 Forward Primer
aaaaatttctactgctcagggttg

SEQ ID NO: 16706 - DNA, 20 bp, Artificial Sequence
  Chr18_1 Forward Primer
cttgcaagaatggaaggtcc

SEQ ID NO: 16707 - DNA, 19 bp, Artificial Sequence
  Chr18_1 Forward Primer
acccttgcctaatggttgc

SEQ ID NO: 16708 - DNA, 20 bp, Artificial Sequence
  Chr18_1 Forward Primer
ccccaggggttttaatcaac

SEQ ID NO: 16709 - DNA, 20 bp, Artificial Sequence
  Chr18_1 Forward Primer
attggcattttccctcctct

SEQ ID NO: 16710 - DNA, 24 bp, Artificial Sequence
  Chr18_1 Forward Primer
ttcacaataaaatttgctcaaagg

SEQ ID NO: 16711 - DNA, 20 bp, Artificial Sequence
  Chr18_1 Forward Primer
tcagggaaacaaattgaggc

SEQ ID NO: 16712 - DNA, 20 bp, Artificial Sequence
  Chr18_1 Forward Primer
tcaaacccaacagggatttc

SEQ ID NO: 16713 - DNA, 20 bp, Artificial Sequence
  Chr18_1 Forward Primer
cgaccacatagcccagaaat

SEQ ID NO: 16714 - DNA, 20 bp, Artificial Sequence
  Chr18_1 Forward Primer
agtcccagataaggggcttg

SEQ ID NO: 16715 - DNA, 20 bp, Artificial Sequence
  Chr18_1 Forward Primer
cagaaacattctgagcgcaa

SEQ ID NO: 16716 - DNA, 20 bp, Artificial Sequence
  Chr18_1 Forward Primer
ccataatcgtaggctgaggc

SEQ ID NO: 16717 - DNA, 21 bp, Artificial Sequence
  Chr18_1 Forward Primer
aaacagacaaaatgcctgctc

SEQ ID NO: 16718 - DNA, 20 bp, Artificial Sequence
  Chr18_1 Forward Primer
gaagaccagagcaaaggcac

SEQ ID NO: 16719 - DNA, 20 bp, Artificial Sequence
  Chr18_1 Forward Primer
agagagtcgattcccagggt

SEQ ID NO: 16720 - DNA, 23 bp, Artificial Sequence
  Chr18_1 Forward Primer
tgatctgttttctccaaatgtca

SEQ ID NO: 16721 - DNA, 20 bp, Artificial Sequence
  Chr18_1 Forward Primer
gcaactttgcttcaaccctt

SEQ ID NO: 16722 - DNA, 20 bp, Artificial Sequence
  Chr18_1 Forward Primer
ccccagatgacttgaaatgc

SEQ ID NO: 16723 - DNA, 20 bp, Artificial Sequence
  Chr18_1 Forward Primer
agggcagaagctgatgaaaa

SEQ ID NO: 16724 - DNA, 20 bp, Artificial Sequence
  Chr18_1 Forward Primer
agggcctcctgtctctcatc

SEQ ID NO: 16725 - DNA, 20 bp, Artificial Sequence
  Chr18_1 Forward Primer
gtggaaatgttccgatgagg

SEQ ID NO: 16726 - DNA, 20 bp, Artificial Sequence
  Chr18_1 Forward Primer
gggcaggtagcagccttagt

SEQ ID NO: 16727 - DNA, 19 bp, Artificial Sequence
  Chr18_1 Forward Primer
gcgatttttgcctgacatc

SEQ ID NO: 16728 - DNA, 20 bp, Artificial Sequence
  Chr18_1 Forward Primer
aggtgtaacccggttgtgag

SEQ ID NO: 16729 - DNA, 20 bp, Artificial Sequence
  Chr18_1 Forward Primer
ttgaggacctatccagtgcc

SEQ ID NO: 16730 - DNA, 20 bp, Artificial Sequence
  Chr18_1 Forward Primer
atggcaatacgggtcttcac

SEQ ID NO: 16731 - DNA, 20 bp, Artificial Sequence
  Chr18_1 Forward Primer
caagtcttatccaccagcca

SEQ ID NO: 16732 - DNA, 22 bp, Artificial Sequence
  Chr18_1 Forward Primer
tgtaattgaccagagtccacat

SEQ ID NO: 16733 - DNA, 24 bp, Artificial Sequence
  Chr18_1 Forward Primer
ttcctggcatatagcaaatagtca

SEQ ID NO: 16734 - DNA, 20 bp, Artificial Sequence
  Chr18_1 Forward Primer
ctgctggctcacatctgaaa

SEQ ID NO: 16735 - DNA, 20 bp, Artificial Sequence
  Chr18_1 Forward Primer
ctataagccaaaggaggggg

SEQ ID NO: 16736 - DNA, 20 bp, Artificial Sequence
  Chr18_1 Forward Primer
ggttatgctgatccacaccc

SEQ ID NO: 16737 - DNA, 20 bp, Artificial Sequence
  Chr18_1 Forward Primer
gtggcatttgctgaagacct

SEQ ID NO: 16738 - DNA, 20 bp, Artificial Sequence
  Chr18_1 Forward Primer
cttcaccctatgagcctcca

SEQ ID NO: 16739 - DNA, 20 bp, Artificial Sequence
  Chr18_1 Forward Primer
cgggagacttccctacttcc

SEQ ID NO: 16740 - DNA, 20 bp, Artificial Sequence
  Chr18_1 Forward Primer
agggctaggagtcagtgtgg

SEQ ID NO: 16741 - DNA, 20 bp, Artificial Sequence
  Chr18_1 Forward Primer
cagtgggctgcattacagaa

SEQ ID NO: 16742 - DNA, 20 bp, Artificial Sequence
  Chr18_1 Forward Primer
cccgacaatgactgtgtgtt

SEQ ID NO: 16743 - DNA, 20 bp, Artificial Sequence
  Chr18_1 Forward Primer
tccgcagttgtcctttcaat

SEQ ID NO: 16744 - DNA, 21 bp, Artificial Sequence
  Chr18_1 Forward Primer
ctctggcatgagacatgaaca

SEQ ID NO: 16745 - DNA, 20 bp, Artificial Sequence
  Chr18_1 Forward Primer
gaccttgctttttgatccca

SEQ ID NO: 16746 - DNA, 23 bp, Artificial Sequence
  Chr18_1 Forward Primer
tctactcttcttcccaacaagga

SEQ ID NO: 16747 - DNA, 20 bp, Artificial Sequence
  Chr18_1 Forward Primer
tcattccttggccaattttc

SEQ ID NO: 16748 - DNA, 21 bp, Artificial Sequence
  Chr18_1 Forward Primer
cccacttgctaaaactccctt

SEQ ID NO: 16749 - DNA, 20 bp, Artificial Sequence
  Chr18_1 Forward Primer
cccttcagggattactgggt

SEQ ID NO: 16750 - DNA, 20 bp, Artificial Sequence
  Chr18_1 Forward Primer
tcagtggaattaggccttgc

SEQ ID NO: 16751 - DNA, 21 bp, Artificial Sequence
  Chr18_1 Forward Primer
tgacagtcattaccttgcagc

SEQ ID NO: 16752 - DNA, 25 bp, Artificial Sequence
  Chr18_1 Forward Primer
gaaacagtagaggaaaatcccaaat

SEQ ID NO: 16753 - DNA, 20 bp, Artificial Sequence
  Chr18_1 Forward Primer
ttctagggacaccagcatcc

SEQ ID NO: 16754 - DNA, 20 bp, Artificial Sequence
  Chr18_1 Forward Primer
ttcagtgagtggccttacca

SEQ ID NO: 16755 - DNA, 24 bp, Artificial Sequence
  Chr18_1 Forward Primer
tccctttatattctgccttctagc

SEQ ID NO: 16756 - DNA, 20 bp, Artificial Sequence
  Chr18_1 Forward Primer
tggaatgaccagagaaggct

SEQ ID NO: 16757 - DNA, 20 bp, Artificial Sequence
  Chr18_1 Reverse Primer
acgtcaccacttccatcaca

SEQ ID NO: 16758 - DNA, 20 bp, Artificial Sequence
  Chr18_1 Reverse Primer
ttggcaaatgtggaatctca

SEQ ID NO: 16759 - DNA, 21 bp, Artificial Sequence
  Chr18_1 Reverse Primer
tgaaacagctcacaaagctca

SEQ ID NO: 16760 - DNA, 20 bp, Artificial Sequence
  Chr18_1 Reverse Primer
tccctattgcctgggtctaa

SEQ ID NO: 16761 - DNA, 21 bp, Artificial Sequence
  Chr18_1 Reverse Primer
tcacagtgtgcttctggaaaa

SEQ ID NO: 16762 - DNA, 20 bp, Artificial Sequence
  Chr18_1 Reverse Primer
tttcacagtggttttggcag

SEQ ID NO: 16763 - DNA, 20 bp, Artificial Sequence
  Chr18_1 Reverse Primer
taagtatggatgcccagcct

SEQ ID NO: 16764 - DNA, 20 bp, Artificial Sequence
  Chr18_1 Reverse Primer
gctcaacaggagctttctgg

SEQ ID NO: 16765 - DNA, 20 bp, Artificial Sequence
  Chr18_1 Reverse Primer
ctggcctgggtgaactttta

SEQ ID NO: 16766 - DNA, 20 bp, Artificial Sequence
  Chr18_1 Reverse Primer
tcagaaattttgccatcacg

SEQ ID NO: 16767 - DNA, 20 bp, Artificial Sequence
  Chr18_1 Reverse Primer
tgtgctttttcttcctggct

SEQ ID NO: 16768 - DNA, 24 bp, Artificial Sequence
  Chr18_1 Reverse Primer
cccaagttaaaacttcctctatcg

SEQ ID NO: 16769 - DNA, 21 bp, Artificial Sequence
  Chr18_1 Reverse Primer
ggatgcaccatgtatcaaacc

SEQ ID NO: 16770 - DNA, 20 bp, Artificial Sequence
  Chr18_1 Reverse Primer
taccagtgtgcacaggaagc

SEQ ID NO: 16771 - DNA, 20 bp, Artificial Sequence
  Chr18_1 Reverse Primer
agggttcccatacagatccc

SEQ ID NO: 16772 - DNA, 20 bp, Artificial Sequence
  Chr18_1 Reverse Primer
cttgttttctcgcatcgtca

SEQ ID NO: 16773 - DNA, 20 bp, Artificial Sequence
  Chr18_1 Reverse Primer
ctgttctggaaacaggggaa

SEQ ID NO: 16774 - DNA, 20 bp, Artificial Sequence
  Chr18_1 Reverse Primer
agctgatgaaagtgccatga

SEQ ID NO: 16775 - DNA, 25 bp, Artificial Sequence
  Chr18_1 Reverse Primer
tcatgacaaaatagactatggatgg

SEQ ID NO: 16776 - DNA, 20 bp, Artificial Sequence
  Chr18_1 Reverse Primer
ttaacccttgccttttgctt

SEQ ID NO: 16777 - DNA, 20 bp, Artificial Sequence
  Chr18_1 Reverse Primer
tatccccgagtcctctttca

SEQ ID NO: 16778 - DNA, 20 bp, Artificial Sequence
  Chr18_1 Reverse Primer
actttaaggggccagcattt

SEQ ID NO: 16779 - DNA, 20 bp, Artificial Sequence
  Chr18_1 Reverse Primer
aattatgtcaggcactgggc

SEQ ID NO: 16780 - DNA, 23 bp, Artificial Sequence
  Chr18_1 Reverse Primer
gcgaattctcagtgtagtgtacg

SEQ ID NO: 16781 - DNA, 20 bp, Artificial Sequence
  Chr18_1 Reverse Primer
gctagctgagctgctggttt

SEQ ID NO: 16782 - DNA, 20 bp, Artificial Sequence
  Chr18_1 Reverse Primer
ggttttgcttaattccaggc

SEQ ID NO: 16783 - DNA, 21 bp, Artificial Sequence
  Chr18_1 Reverse Primer
gctattttcctagggattgcc

SEQ ID NO: 16784 - DNA, 21 bp, Artificial Sequence
  Chr18_1 Reverse Primer
gcctcttgtggcagcatataa

SEQ ID NO: 16785 - DNA, 22 bp, Artificial Sequence
  Chr18_1 Reverse Primer
tcttccatcctttcttccttga

SEQ ID NO: 16786 - DNA, 20 bp, Artificial Sequence
  Chr18_1 Reverse Primer
gctcttttgtggcctttcag

SEQ ID NO: 16787 - DNA, 20 bp, Artificial Sequence
  Chr18_1 Reverse Primer
ggcgaacagaaaattggaga

SEQ ID NO: 16788 - DNA, 20 bp, Artificial Sequence
  Chr18_1 Reverse Primer
agctttctacttgtccgcga

SEQ ID NO: 16789 - DNA, 23 bp, Artificial Sequence
  Chr18_1 Reverse Primer
ctgaaaaagcaaggaaaatgtta

SEQ ID NO: 16790 - DNA, 24 bp, Artificial Sequence
  Chr18_1 Reverse Primer
ggggttaaactcttttactcttgc

SEQ ID NO: 16791 - DNA, 20 bp, Artificial Sequence
  Chr18_1 Reverse Primer
acctctggactctggaagcc

SEQ ID NO: 16792 - DNA, 20 bp, Artificial Sequence
  Chr18_1 Reverse Primer
aggctctcatgcagcctaaa

SEQ ID NO: 16793 - DNA, 20 bp, Artificial Sequence
  Chr18_1 Reverse Primer
tatcagcctcctgctccaac

SEQ ID NO: 16794 - DNA, 25 bp, Artificial Sequence
  Chr18_1 Reverse Primer
gaaatgccttattcttttgttagtg

SEQ ID NO: 16795 - DNA, 20 bp, Artificial Sequence
  Chr18_1 Reverse Primer
gtggccagatgtgaggatct

SEQ ID NO: 16796 - DNA, 20 bp, Artificial Sequence
  Chr18_1 Reverse Primer
tgatggatagtgcaggtgga

SEQ ID NO: 16797 - DNA, 20 bp, Artificial Sequence
  Chr18_1 Reverse Primer
cactgctctaggtgcttggg

SEQ ID NO: 16798 - DNA, 20 bp, Artificial Sequence
  Chr18_1 Reverse Primer
tgttccatctcctaccccaa

SEQ ID NO: 16799 - DNA, 20 bp, Artificial Sequence
  Chr18_1 Reverse Primer
cagcagatggaaggacacaa

SEQ ID NO: 16800 - DNA, 21 bp, Artificial Sequence
  Chr18_1 Reverse Primer
tgagaaaattggaaaccaagg

SEQ ID NO: 16801 - DNA, 26 bp, Artificial Sequence
  Chr18_1 Reverse Primer
caagaatgaatagcttacaaaaacca

SEQ ID NO: 16802 - DNA, 20 bp, Artificial Sequence
  Chr18_1 Reverse Primer
tcatcggattttcaaggagc

SEQ ID NO: 16803 - DNA, 20 bp, Artificial Sequence
  Chr18_1 Reverse Primer
caattgtgttctgagccacg

SEQ ID NO: 16804 - DNA, 20 bp, Artificial Sequence
  Chr18_1 Reverse Primer
aggcaaagaaagccaactca

SEQ ID NO: 16805 - DNA, 20 bp, Artificial Sequence
  Chr18_1 Reverse Primer
cattttggccataaagagcc

SEQ ID NO: 16806 - DNA, 20 bp, Artificial Sequence
  Chr18_1 Reverse Primer
tttcatttccccagtgctgt

SEQ ID NO: 16807 - DNA, 20 bp, Artificial Sequence
  Chr18_1 Reverse Primer
atggaacaggatcacttcgc

SEQ ID NO: 16808 - DNA, 20 bp, Artificial Sequence
  Chr18_1 Reverse Primer
cctggcataggttgcatttt

SEQ ID NO: 16809 - DNA, 20 bp, Artificial Sequence
  Chr18_1 Reverse Primer
tctgctgtttcagcctgatg

SEQ ID NO: 16810 - DNA, 20 bp, Artificial Sequence
  Chr18_1 Reverse Primer
ggaaccaacctgtattccga

SEQ ID NO: 16811 - DNA, 20 bp, Artificial Sequence
  Chr18_1 Reverse Primer
acccgtgcctacctatttcc

SEQ ID NO: 16812 - DNA, 20 bp, Artificial Sequence
  Chr18_1 Reverse Primer
agtcactaccagcgggagaa

SEQ ID NO: 16813 - DNA, 20 bp, Artificial Sequence
  Chr18_1 Reverse Primer
ccccagaaagtctcatgctc

SEQ ID NO: 16814 - DNA, 20 bp, Artificial Sequence
  Chr18_1 Reverse Primer
gctcagagtcttccaatggc

SEQ ID NO: 16815 - DNA, 20 bp, Artificial Sequence
  Chr18_1 Reverse Primer
taaaacacttgggggtggag

SEQ ID NO: 16816 - DNA, 21 bp, Artificial Sequence
  Chr18_1 Reverse Primer
aggaaatgccctgtagactga

SEQ ID NO: 16817 - DNA, 21 bp, Artificial Sequence
  Chr18_1 Reverse Primer
tcattcaaataacatgtgcca

SEQ ID NO: 16818 - DNA, 20 bp, Artificial Sequence
  Chr18_1 Reverse Primer
aggtcagggctgtgacaatc

SEQ ID NO: 16819 - DNA, 20 bp, Artificial Sequence
  Chr18_1 Reverse Primer
ccatacaatgctccctggtt

SEQ ID NO: 16820 - DNA, 20 bp, Artificial Sequence
  Chr18_1 Reverse Primer
agggagggaaaccagaacag

SEQ ID NO: 16821 - DNA, 20 bp, Artificial Sequence
  Chr18_1 Reverse Primer
aactaccctccccatctgct

SEQ ID NO: 16822 - DNA, 20 bp, Artificial Sequence
  Chr18_1 Reverse Primer
ttccacgaagtccattttga

SEQ ID NO: 16823 - DNA, 23 bp, Artificial Sequence
  Chr18_1 Reverse Primer
tggtcacaccatttaaagaacaa

SEQ ID NO: 16824 - DNA, 20 bp, Artificial Sequence
  Chr18_1 Reverse Primer
aggtcaagtgctctgtctgc

SEQ ID NO: 16825 - DNA, 20 bp, Artificial Sequence
  Chr18_1 Reverse Primer
gtacacgggctttggaatca

SEQ ID NO: 16826 - DNA, 20 bp, Artificial Sequence
  Chr18_1 Reverse Primer
atggatgcttggggaacata

SEQ ID NO: 16827 - DNA, 22 bp, Artificial Sequence
  Chr18_1 Reverse Primer
tcctgaaaacttaatggagtgg

SEQ ID NO: 16828 - DNA, 20 bp, Artificial Sequence
  Chr18_1 Reverse Primer
gtgatctttctgctgtggca

SEQ ID NO: 16829 - DNA, 27 bp, Artificial Sequence
  Chr18_1 Reverse Primer
tgatacctttcttattttagtgttgcc

SEQ ID NO: 16830 - DNA, 20 bp, Artificial Sequence
  Chr18_1 Reverse Primer
gagtcctaggccccactctc

SEQ ID NO: 16831 - DNA, 20 bp, Artificial Sequence
  Chr18_1 Reverse Primer
ttggacatgttcggcattta

SEQ ID NO: 16832 - DNA, 20 bp, Artificial Sequence
  Chr18_1 Reverse Primer
ctggtgaatgatgaaagggc

SEQ ID NO: 16833 - DNA, 20 bp, Artificial Sequence
  Chr18_1 Reverse Primer
gagccattggaaggtttgaa

SEQ ID NO: 16834 - DNA, 18 bp, Artificial Sequence
  Chr18_1 Reverse Primer
cacggggtgttgaaggag

SEQ ID NO: 16835 - DNA, 20 bp, Artificial Sequence
  Chr18_1 Reverse Primer
ggagttgtcctttgccacat

SEQ ID NO: 16836 - DNA, 20 bp, Artificial Sequence
  Chr18_1 Reverse Primer
tagaaaatgggctttggggt

SEQ ID NO: 16837 - DNA, 20 bp, Artificial Sequence
  Chr18_1 Reverse Primer
gcctgtttctgcaggactgt

SEQ ID NO: 16838 - DNA, 24 bp, Artificial Sequence
  Chr18_1 Reverse Primer
ggttgcacaatgtaaaaattgact

SEQ ID NO: 16839 - DNA, 20 bp, Artificial Sequence
  Chr18_1 Reverse Primer
agagcccgagaggctaaaaa

SEQ ID NO: 16840 - DNA, 20 bp, Artificial Sequence
  Chr18_1 Reverse Primer
gggcaaatacttcccaagga

SEQ ID NO: 16841 - DNA, 20 bp, Artificial Sequence
  Chr18_1 Reverse Primer
tgctgtggctcatctgattc

SEQ ID NO: 16842 - DNA, 20 bp, Artificial Sequence
  Chr18_1 Reverse Primer
ctgcagtgctcaacacatga

SEQ ID NO: 16843 - DNA, 21 bp, Artificial Sequence
  Chr18_1 Reverse Primer
caggggagaacaatgcataaa

SEQ ID NO: 16844 - DNA, 20 bp, Artificial Sequence
  Chr18_1 Reverse Primer
ttgaggaaaaagagcaagcc

SEQ ID NO: 16845 - DNA, 20 bp, Artificial Sequence
  Chr18_1 Reverse Primer
gcctctaccagccacctgta

SEQ ID NO: 16846 - DNA, 20 bp, Artificial Sequence
  Chr18_1 Reverse Primer
aggaatgtgacgcatgtctg

SEQ ID NO: 16847 - DNA, 20 bp, Artificial Sequence
  Chr18_1 Reverse Primer
gcttcccaaactggcttgta

SEQ ID NO: 16848 - DNA, 23 bp, Artificial Sequence
  Chr18_1 Reverse Primer
cctcctataattcctgaggtgga

SEQ ID NO: 16849 - DNA, 20 bp, Artificial Sequence
  Chr18_1 Reverse Primer
ggaaatggtaaaagctgcca

SEQ ID NO: 16850 - DNA, 20 bp, Artificial Sequence
  Chr18_1 Reverse Primer
gaagcagggactgtgtcctc

SEQ ID NO: 16851 - DNA, 20 bp, Artificial Sequence
  Chr18_1 Reverse Primer
tacttccaacacaccaggca

SEQ ID NO: 16852 - DNA, 20 bp, Artificial Sequence
  Chr18_1 Reverse Primer
tctcctacttcctgccctcc

SEQ ID NO: 16853 - DNA, 20 bp, Artificial Sequence
  Chr18_2 Forward Primer
tgggtcacatggtaagagca

SEQ ID NO: 16854 - DNA, 20 bp, Artificial Sequence
  Chr18_2 Forward Primer
catgtgctccactggactgt

SEQ ID NO: 16855 - DNA, 21 bp, Artificial Sequence
  Chr18_2 Forward Primer
tcacaccgatgttctcattca

SEQ ID NO: 16856 - DNA, 20 bp, Artificial Sequence
  Chr18_2 Forward Primer
ttctgtgaagcagagggctt

SEQ ID NO: 16857 - DNA, 19 bp, Artificial Sequence
  Chr18_2 Forward Primer
gaaaaccctggcttcatgg

SEQ ID NO: 16858 - DNA, 20 bp, Artificial Sequence
  Chr18_2 Forward Primer
cctacagggcctttttctcc

SEQ ID NO: 16859 - DNA, 20 bp, Artificial Sequence
  Chr18_2 Forward Primer
caggagactgtgcaaggtga

SEQ ID NO: 16860 - DNA, 19 bp, Artificial Sequence
  Chr18_2 Forward Primer
cactgctgccctatggaga

SEQ ID NO: 16861 - DNA, 20 bp, Artificial Sequence
  Chr18_2 Forward Primer
ttgaaacagaacttcggggt

SEQ ID NO: 16862 - DNA, 20 bp, Artificial Sequence
  Chr18_2 Forward Primer
aatggttggaagtaccacgg

SEQ ID NO: 16863 - DNA, 20 bp, Artificial Sequence
  Chr18_2 Forward Primer
ctgcttcacaattttggcct

SEQ ID NO: 16864 - DNA, 20 bp, Artificial Sequence
  Chr18_2 Forward Primer
ggactgaggcagtctggaac

SEQ ID NO: 16865 - DNA, 20 bp, Artificial Sequence
  Chr18_2 Forward Primer
gagcttcaggcactcctcag

SEQ ID NO: 16866 - DNA, 20 bp, Artificial Sequence
  Chr18_2 Forward Primer
cagatcatttccctctcccc

SEQ ID NO: 16867 - DNA, 22 bp, Artificial Sequence
  Chr18_2 Forward Primer
tcactgctcattagtttcacgg

SEQ ID NO: 16868 - DNA, 20 bp, Artificial Sequence
  Chr18_2 Forward Primer
ctgtttccaacctcagccat

SEQ ID NO: 16869 - DNA, 20 bp, Artificial Sequence
  Chr18_2 Forward Primer
cctccgtcagtgtttgatga

SEQ ID NO: 16870 - DNA, 20 bp, Artificial Sequence
  Chr18_2 Forward Primer
tcacacaactttctctgcgg

SEQ ID NO: 16871 - DNA, 20 bp, Artificial Sequence
  Chr18_2 Forward Primer
ttgctggcaatttatacccc

SEQ ID NO: 16872 - DNA, 20 bp, Artificial Sequence
  Chr18_2 Forward Primer
atcacagctcaggaaacgct

SEQ ID NO: 16873 - DNA, 20 bp, Artificial Sequence
  Chr18_2 Forward Primer
cctgatcccaaaggaagtga

SEQ ID NO: 16874 - DNA, 20 bp, Artificial Sequence
  Chr18_2 Forward Primer
ccacttctccaggaccagaa

SEQ ID NO: 16875 - DNA, 20 bp, Artificial Sequence
  Chr18_2 Forward Primer
tggactaagtatggccaggg

SEQ ID NO: 16876 - DNA, 20 bp, Artificial Sequence
  Chr18_2 Forward Primer
atacagagccgcagcagttt

SEQ ID NO: 16877 - DNA, 20 bp, Artificial Sequence
  Chr18_2 Forward Primer
aaaaagtttacccaggcagc

SEQ ID NO: 16878 - DNA, 21 bp, Artificial Sequence
  Chr18_2 Forward Primer
ccatctctttgtggtctgagg

SEQ ID NO: 16879 - DNA, 20 bp, Artificial Sequence
  Chr18_2 Forward Primer
tgtgtggggacagttgaaaa

SEQ ID NO: 16880 - DNA, 20 bp, Artificial Sequence
  Chr18_2 Forward Primer
ctcaggtggaggtcaagtcc

SEQ ID NO: 16881 - DNA, 20 bp, Artificial Sequence
  Chr18_2 Forward Primer
ggaggaggagagactggagg

SEQ ID NO: 16882 - DNA, 20 bp, Artificial Sequence
  Chr18_2 Forward Primer
tcagctcttaaagaaccccg

SEQ ID NO: 16883 - DNA, 19 bp, Artificial Sequence
  Chr18_2 Forward Primer
gacgctttgggaactggac

SEQ ID NO: 16884 - DNA, 18 bp, Artificial Sequence
  Chr18_2 Forward Primer
gacctgaccggggagttt

SEQ ID NO: 16885 - DNA, 20 bp, Artificial Sequence
  Chr18_2 Forward Primer
cctgcacagcctttaggaag

SEQ ID NO: 16886 - DNA, 20 bp, Artificial Sequence
  Chr18_2 Forward Primer
aggactccttagctctgccc

SEQ ID NO: 16887 - DNA, 20 bp, Artificial Sequence
  Chr18_2 Forward Primer
gagatggtgagcagcattga

SEQ ID NO: 16888 - DNA, 27 bp, Artificial Sequence
  Chr18_2 Forward Primer
tgcattctgtatatggtattgtctttt

SEQ ID NO: 16889 - DNA, 20 bp, Artificial Sequence
  Chr18_2 Forward Primer
gctttttaaaacagggggct

SEQ ID NO: 16890 - DNA, 20 bp, Artificial Sequence
  Chr18_2 Forward Primer
ggcaggtttttagggctgtc

SEQ ID NO: 16891 - DNA, 20 bp, Artificial Sequence
  Chr18_2 Forward Primer
gaccagcctcatagctcctg

SEQ ID NO: 16892 - DNA, 20 bp, Artificial Sequence
  Chr18_2 Forward Primer
tggaatctgggcttatccag

SEQ ID NO: 16893 - DNA, 21 bp, Artificial Sequence
  Chr18_2 Forward Primer
tctccctctgttccttccttt

SEQ ID NO: 16894 - DNA, 20 bp, Artificial Sequence
  Chr18_2 Forward Primer
ggcagagaaaggactgaagc

SEQ ID NO: 16895 - DNA, 20 bp, Artificial Sequence
  Chr18_2 Forward Primer
ttccaccaagcttgttttcc

SEQ ID NO: 16896 - DNA, 22 bp, Artificial Sequence
  Chr18_2 Forward Primer
tccacttaacgaggacacagaa

SEQ ID NO: 16897 - DNA, 20 bp, Artificial Sequence
  Chr18_2 Forward Primer
taaattaccgctgtctgcaa

SEQ ID NO: 16898 - DNA, 20 bp, Artificial Sequence
  Chr18_2 Forward Primer
ctctgagcagggaaatcagg

SEQ ID NO: 16899 - DNA, 20 bp, Artificial Sequence
  Chr18_2 Forward Primer
agctcagctggcagagtgac

SEQ ID NO: 16900 - DNA, 20 bp, Artificial Sequence
  Chr18_2 Forward Primer
tgcagatgtgcttcgacttc

SEQ ID NO: 16901 - DNA, 20 bp, Artificial Sequence
  Chr18_2 Forward Primer
gagggctgccatacactgat

SEQ ID NO: 16902 - DNA, 20 bp, Artificial Sequence
  Chr18_2 Forward Primer
tttacctgtggcaagagcct

SEQ ID NO: 16903 - DNA, 20 bp, Artificial Sequence
  Chr18_2 Forward Primer
gcacatatcatgggcctagc

SEQ ID NO: 16904 - DNA, 20 bp, Artificial Sequence
  Chr18_2 Forward Primer
ctagcagcatctgtgggaca

SEQ ID NO: 16905 - DNA, 20 bp, Artificial Sequence
  Chr18_2 Forward Primer
tgcttggcctgaacattttt

SEQ ID NO: 16906 - DNA, 20 bp, Artificial Sequence
  Chr18_2 Forward Primer
ctcaggtaggttcagggcaa

SEQ ID NO: 16907 - DNA, 20 bp, Artificial Sequence
  Chr18_2 Forward Primer
cttgtgtcgtctgtggagga

SEQ ID NO: 16908 - DNA, 20 bp, Artificial Sequence
  Chr18_2 Forward Primer
ccatcagcaccacactctgt

SEQ ID NO: 16909 - DNA, 20 bp, Artificial Sequence
  Chr18_2 Forward Primer
gcctgacaaatccaccttgt

SEQ ID NO: 16910 - DNA, 20 bp, Artificial Sequence
  Chr18_2 Forward Primer
tcctgggattttgcattttt

SEQ ID NO: 16911 - DNA, 20 bp, Artificial Sequence
  Chr18_2 Forward Primer
tgagggaatggcttctgttc

SEQ ID NO: 16912 - DNA, 20 bp, Artificial Sequence
  Chr18_2 Forward Primer
gctcgtgagccaagtgtgta

SEQ ID NO: 16913 - DNA, 20 bp, Artificial Sequence
  Chr18_2 Forward Primer
ctgtctcctggcttcctgag

SEQ ID NO: 16914 - DNA, 21 bp, Artificial Sequence
  Chr18_2 Forward Primer
gtaatctagtgggttgcagcg

SEQ ID NO: 16915 - DNA, 20 bp, Artificial Sequence
  Chr18_2 Forward Primer
atgttaagacagggggaggg

SEQ ID NO: 16916 - DNA, 20 bp, Artificial Sequence
  Chr18_2 Forward Primer
tagggcccacatgcatttat

SEQ ID NO: 16917 - DNA, 20 bp, Artificial Sequence
  Chr18_2 Forward Primer
acacatggctcgtgtgaaag

SEQ ID NO: 16918 - DNA, 20 bp, Artificial Sequence
  Chr18_2 Forward Primer
gccaggtttatcactttcgc

SEQ ID NO: 16919 - DNA, 20 bp, Artificial Sequence
  Chr18_2 Forward Primer
caatggttgtccaaaccaca

SEQ ID NO: 16920 - DNA, 20 bp, Artificial Sequence
  Chr18_2 Forward Primer
tgctctcatctcctccctgt

SEQ ID NO: 16921 - DNA, 20 bp, Artificial Sequence
  Chr18_2 Forward Primer
cccctttcaacaaaatcacc

SEQ ID NO: 16922 - DNA, 20 bp, Artificial Sequence
  Chr18_2 Forward Primer
agcttcctgctctctcctcc

SEQ ID NO: 16923 - DNA, 20 bp, Artificial Sequence
  Chr18_2 Forward Primer
ccctggtcatgagttgtgtg

SEQ ID NO: 16924 - DNA, 20 bp, Artificial Sequence
  Chr18_2 Forward Primer
gaacggggtctctcccttag

SEQ ID NO: 16925 - DNA, 20 bp, Artificial Sequence
  Chr18_2 Forward Primer
cctcactgtcccattccagt

SEQ ID NO: 16926 - DNA, 20 bp, Artificial Sequence
  Chr18_2 Forward Primer
gccagtgacccttgtaatcc

SEQ ID NO: 16927 - DNA, 20 bp, Artificial Sequence
  Chr18_2 Forward Primer
tcttcttgtccctgtcctgg

SEQ ID NO: 16928 - DNA, 20 bp, Artificial Sequence
  Chr18_2 Forward Primer
tcctgcagaaaggctgaagt

SEQ ID NO: 16929 - DNA, 20 bp, Artificial Sequence
  Chr18_2 Forward Primer
gaaaaccaagtgcggaagaa

SEQ ID NO: 16930 - DNA, 20 bp, Artificial Sequence
  Chr18_2 Forward Primer
ttgcctccgttaggaatctg

SEQ ID NO: 16931 - DNA, 21 bp, Artificial Sequence
  Chr18_2 Forward Primer
tttttaagcattttggaagcg

SEQ ID NO: 16932 - DNA, 20 bp, Artificial Sequence
  Chr18_2 Forward Primer
tctgagctgctgttggagtg

SEQ ID NO: 16933 - DNA, 20 bp, Artificial Sequence
  Chr18_2 Forward Primer
cataagggactgtgcttggg

SEQ ID NO: 16934 - DNA, 20 bp, Artificial Sequence
  Chr18_2 Forward Primer
gactgtcagatgagatggcg

SEQ ID NO: 16935 - DNA, 20 bp, Artificial Sequence
  Chr18_2 Forward Primer
aagacattcagggaacgtgg

SEQ ID NO: 16936 - DNA, 22 bp, Artificial Sequence
  Chr18_2 Forward Primer
tgaggaaactgaggtctaggga

SEQ ID NO: 16937 - DNA, 20 bp, Artificial Sequence
  Chr18_2 Forward Primer
aatccacctaaaaccccagg

SEQ ID NO: 16938 - DNA, 20 bp, Artificial Sequence
  Chr18_2 Forward Primer
tattagaggtgcctgtgcca

SEQ ID NO: 16939 - DNA, 20 bp, Artificial Sequence
  Chr18_2 Forward Primer
gcctgggttcacatctctgt

SEQ ID NO: 16940 - DNA, 20 bp, Artificial Sequence
  Chr18_2 Forward Primer
gcgttagggagaggacactg

SEQ ID NO: 16941 - DNA, 20 bp, Artificial Sequence
  Chr18_2 Forward Primer
tcttgtaatgcctgcaccag

SEQ ID NO: 16942 - DNA, 20 bp, Artificial Sequence
  Chr18_2 Forward Primer
ttgtagggtccctgttcctg

SEQ ID NO: 16943 - DNA, 20 bp, Artificial Sequence
  Chr18_2 Forward Primer
gcctgaggcttccctagtct

SEQ ID NO: 16944 - DNA, 20 bp, Artificial Sequence
  Chr18_2 Forward Primer
gcgggctttatttgtgtctg

SEQ ID NO: 16945 - DNA, 20 bp, Artificial Sequence
  Chr18_2 Forward Primer
cctgcctcaaggtagacagc

SEQ ID NO: 16946 - DNA, 20 bp, Artificial Sequence
  Chr18_2 Forward Primer
gagaatcctcctctgtcccc

SEQ ID NO: 16947 - DNA, 20 bp, Artificial Sequence
  Chr18_2 Forward Primer
ccagccacaaacaaacacac

SEQ ID NO: 16948 - DNA, 21 bp, Artificial Sequence
  Chr18_2 Forward Primer
tgctggtactttggtttcagg

SEQ ID NO: 16949 - DNA, 20 bp, Artificial Sequence
  Chr18_2 Reverse Primer
cccaagggaacaatctcaaa

SEQ ID NO: 16950 - DNA, 20 bp, Artificial Sequence
  Chr18_2 Reverse Primer
acagtggccagaaatccttg

SEQ ID NO: 16951 - DNA, 21 bp, Artificial Sequence
  Chr18_2 Reverse Primer
gcttggaaaaaggcatcttct

SEQ ID NO: 16952 - DNA, 20 bp, Artificial Sequence
  Chr18_2 Reverse Primer
gaaaatccccgagagagtcc

SEQ ID NO: 16953 - DNA, 20 bp, Artificial Sequence
  Chr18_2 Reverse Primer
ggtattgatgtccagctgcc

SEQ ID NO: 16954 - DNA, 20 bp, Artificial Sequence
  Chr18_2 Reverse Primer
agaagctgaagccagtgtgc

SEQ ID NO: 16955 - DNA, 20 bp, Artificial Sequence
  Chr18_2 Reverse Primer
ctcccatcctgtctagtggc

SEQ ID NO: 16956 - DNA, 22 bp, Artificial Sequence
  Chr18_2 Reverse Primer
tgagacacaactcagatcgaca

SEQ ID NO: 16957 - DNA, 20 bp, Artificial Sequence
  Chr18_2 Reverse Primer
acacttccagttgaccctgg

SEQ ID NO: 16958 - DNA, 20 bp, Artificial Sequence
  Chr18_2 Reverse Primer
actaaatggggaccatgctg

SEQ ID NO: 16959 - DNA, 20 bp, Artificial Sequence
  Chr18_2 Reverse Primer
cccacgaaagacagaggaaa

SEQ ID NO: 16960 - DNA, 20 bp, Artificial Sequence
  Chr18_2 Reverse Primer
ctgctcgttcattcagcaaa

SEQ ID NO: 16961 - DNA, 20 bp, Artificial Sequence
  Chr18_2 Reverse Primer
tgcaaaaagggaactcttgg

SEQ ID NO: 16962 - DNA, 20 bp, Artificial Sequence
  Chr18_2 Reverse Primer
aaactgctggcacacacaac

SEQ ID NO: 16963 - DNA, 20 bp, Artificial Sequence
  Chr18_2 Reverse Primer
gagggcacaagaggactgag

SEQ ID NO: 16964 - DNA, 20 bp, Artificial Sequence
  Chr18_2 Reverse Primer
ggtgaggggtcgtttgtaga

SEQ ID NO: 16965 - DNA, 20 bp, Artificial Sequence
  Chr18_2 Reverse Primer
tccctgaggttgaaggagtg

SEQ ID NO: 16966 - DNA, 20 bp, Artificial Sequence
  Chr18_2 Reverse Primer
agtgttgagcaaggtacccg

SEQ ID NO: 16967 - DNA, 21 bp, Artificial Sequence
  Chr18_2 Reverse Primer
gccacagctctatctgtcctg

SEQ ID NO: 16968 - DNA, 20 bp, Artificial Sequence
  Chr18_2 Reverse Primer
gcaacttctgctctcagcct

SEQ ID NO: 16969 - DNA, 20 bp, Artificial Sequence
  Chr18_2 Reverse Primer
ctgagcctggacgacttctc

SEQ ID NO: 16970 - DNA, 20 bp, Artificial Sequence
  Chr18_2 Reverse Primer
gaaaaagggaatttgagggc

SEQ ID NO: 16971 - DNA, 20 bp, Artificial Sequence
  Chr18_2 Reverse Primer
atagtgcctgacacaagggg

SEQ ID NO: 16972 - DNA, 20 bp, Artificial Sequence
  Chr18_2 Reverse Primer
ccccatggacaatgaagaag

SEQ ID NO: 16973 - DNA, 20 bp, Artificial Sequence
  Chr18_2 Reverse Primer
ctgcatagaaagctgggagc

SEQ ID NO: 16974 - DNA, 20 bp, Artificial Sequence
  Chr18_2 Reverse Primer
gtaattgccgctagcctttg

SEQ ID NO: 16975 - DNA, 20 bp, Artificial Sequence
  Chr18_2 Reverse Primer
taccatgtttgatgggggat

SEQ ID NO: 16976 - DNA, 20 bp, Artificial Sequence
  Chr18_2 Reverse Primer
gcggcaggacacttagtagg

SEQ ID NO: 16977 - DNA, 19 bp, Artificial Sequence
  Chr18_2 Reverse Primer
aacgcactcgcctgctaat

SEQ ID NO: 16978 - DNA, 19 bp, Artificial Sequence
  Chr18_2 Reverse Primer
gtgaacttgggccagaagc

SEQ ID NO: 16979 - DNA, 20 bp, Artificial Sequence
  Chr18_2 Reverse Primer
ggcaccaggaaacagaaaac

SEQ ID NO: 16980 - DNA, 20 bp, Artificial Sequence
  Chr18_2 Reverse Primer
ccagacaatcgacttcccag

SEQ ID NO: 16981 - DNA, 20 bp, Artificial Sequence
  Chr18_2 Reverse Primer
cgggaaaccttctccttttc

SEQ ID NO: 16982 - DNA, 20 bp, Artificial Sequence
  Chr18_2 Reverse Primer
gggatgagaagatgccaaaa

SEQ ID NO: 16983 - DNA, 20 bp, Artificial Sequence
  Chr18_2 Reverse Primer
tgtgcagactttgcagaacc

SEQ ID NO: 16984 - DNA, 20 bp, Artificial Sequence
  Chr18_2 Reverse Primer
gggttgatgggaaaccaaat

SEQ ID NO: 16985 - DNA, 20 bp, Artificial Sequence
  Chr18_2 Reverse Primer
ccttccaagggtaacagcag

SEQ ID NO: 16986 - DNA, 20 bp, Artificial Sequence
  Chr18_2 Reverse Primer
cagcagttgggggaaaataa

SEQ ID NO: 16987 - DNA, 20 bp, Artificial Sequence
  Chr18_2 Reverse Primer
cacccaccacaaggagactt

SEQ ID NO: 16988 - DNA, 20 bp, Artificial Sequence
  Chr18_2 Reverse Primer
gcaattttgccgctattcat

SEQ ID NO: 16989 - DNA, 20 bp, Artificial Sequence
  Chr18_2 Reverse Primer
gcaggtcttgtggcctaaat

SEQ ID NO: 16990 - DNA, 21 bp, Artificial Sequence
  Chr18_2 Reverse Primer
gcttaaaaggccaaagtacca

SEQ ID NO: 16991 - DNA, 20 bp, Artificial Sequence
  Chr18_2 Reverse Primer
ttagtgggttctgggaatgc

SEQ ID NO: 16992 - DNA, 20 bp, Artificial Sequence
  Chr18_2 Reverse Primer
agctcgacatttttccgatg

SEQ ID NO: 16993 - DNA, 20 bp, Artificial Sequence
  Chr18_2 Reverse Primer
cttggattctactgccctgc

SEQ ID NO: 16994 - DNA, 20 bp, Artificial Sequence
  Chr18_2 Reverse Primer
acattatgcccaaggagtgc

SEQ ID NO: 16995 - DNA, 20 bp, Artificial Sequence
  Chr18_2 Reverse Primer
atgagggcaaacacacatca

SEQ ID NO: 16996 - DNA, 20 bp, Artificial Sequence
  Chr18_2 Reverse Primer
aattcccttgcagctctgtg

SEQ ID NO: 16997 - DNA, 20 bp, Artificial Sequence
  Chr18_2 Reverse Primer
cccagatgaagaatccctga

SEQ ID NO: 16998 - DNA, 20 bp, Artificial Sequence
  Chr18_2 Reverse Primer
acactccaccaggctacacc

SEQ ID NO: 16999 - DNA, 20 bp, Artificial Sequence
  Chr18_2 Reverse Primer
ccgtaacttaatcagcccca

SEQ ID NO: 17000 - DNA, 25 bp, Artificial Sequence
  Chr18_2 Reverse Primer
catgaaagaatgctaagcttcctaa

SEQ ID NO: 17001 - DNA, 20 bp, Artificial Sequence
  Chr18_2 Reverse Primer
gccaaatttgcaaaggtttt

SEQ ID NO: 17002 - DNA, 20 bp, Artificial Sequence
  Chr18_2 Reverse Primer
ctgaacaaggtatggtgggg

SEQ ID NO: 17003 - DNA, 20 bp, Artificial Sequence
  Chr18_2 Reverse Primer
ttccaacccctcaatgaaag

SEQ ID NO: 17004 - DNA, 20 bp, Artificial Sequence
  Chr18_2 Reverse Primer
gcgtactccccaaaagacac

SEQ ID NO: 17005 - DNA, 20 bp, Artificial Sequence
  Chr18_2 Reverse Primer
aacaaatgttcaaccgagcc

SEQ ID NO: 17006 - DNA, 20 bp, Artificial Sequence
  Chr18_2 Reverse Primer
acagcaaccaaaggatgagg

SEQ ID NO: 17007 - DNA, 20 bp, Artificial Sequence
  Chr18_2 Reverse Primer
caggagggacagctagaagg

SEQ ID NO: 17008 - DNA, 20 bp, Artificial Sequence
  Chr18_2 Reverse Primer
gcctcactctcctccacatc

SEQ ID NO: 17009 - DNA, 20 bp, Artificial Sequence
  Chr18_2 Reverse Primer
cacacatgagggagaagcct

SEQ ID NO: 17010 - DNA, 20 bp, Artificial Sequence
  Chr18_2 Reverse Primer
cccccaattttctgaagcat

SEQ ID NO: 17011 - DNA, 20 bp, Artificial Sequence
  Chr18_2 Reverse Primer
ggagcctaggagagtcaggg

SEQ ID NO: 17012 - DNA, 19 bp, Artificial Sequence
  Chr18_2 Reverse Primer
ctcccataccacctgcctt

SEQ ID NO: 17013 - DNA, 20 bp, Artificial Sequence
  Chr18_2 Reverse Primer
ttttcgacaaagatgggagg

SEQ ID NO: 17014 - DNA, 20 bp, Artificial Sequence
  Chr18_2 Reverse Primer
actctggcctgaattcctca

SEQ ID NO: 17015 - DNA, 20 bp, Artificial Sequence
  Chr18_2 Reverse Primer
caccaggagagagcttcacg

SEQ ID NO: 17016 - DNA, 20 bp, Artificial Sequence
  Chr18_2 Reverse Primer
ccaggacagaagctcaaacc

SEQ ID NO: 17017 - DNA, 20 bp, Artificial Sequence
  Chr18_2 Reverse Primer
gtgaatagctgagctgggga

SEQ ID NO: 17018 - DNA, 18 bp, Artificial Sequence
  Chr18_2 Reverse Primer
gtcatgaggacgctggct

SEQ ID NO: 17019 - DNA, 20 bp, Artificial Sequence
  Chr18_2 Reverse Primer
atggcatttgccttcttagc

SEQ ID NO: 17020 - DNA, 20 bp, Artificial Sequence
  Chr18_2 Reverse Primer
gcttggaggtgcctatgagt

SEQ ID NO: 17021 - DNA, 20 bp, Artificial Sequence
  Chr18_2 Reverse Primer
gaaacccagggagagaggac

SEQ ID NO: 17022 - DNA, 20 bp, Artificial Sequence
  Chr18_2 Reverse Primer
ctggagctcacaatgaccag

SEQ ID NO: 17023 - DNA, 19 bp, Artificial Sequence
  Chr18_2 Reverse Primer
ctcaggtgagatggcctca

SEQ ID NO: 17024 - DNA, 20 bp, Artificial Sequence
  Chr18_2 Reverse Primer
tttgggaggagagaatggaa

SEQ ID NO: 17025 - DNA, 20 bp, Artificial Sequence
  Chr18_2 Reverse Primer
ggactgcagatgtgtcctca

SEQ ID NO: 17026 - DNA, 21 bp, Artificial Sequence
  Chr18_2 Reverse Primer
ttccacacccttagcaaatct

SEQ ID NO: 17027 - DNA, 20 bp, Artificial Sequence
  Chr18_2 Reverse Primer
agcaaaatgatggttccagg

SEQ ID NO: 17028 - DNA, 20 bp, Artificial Sequence
  Chr18_2 Reverse Primer
aaactgagatggaaccacgc

SEQ ID NO: 17029 - DNA, 20 bp, Artificial Sequence
  Chr18_2 Reverse Primer
acagcccagaacaagagcaa

SEQ ID NO: 17030 - DNA, 20 bp, Artificial Sequence
  Chr18_2 Reverse Primer
cccatgaaccacagaacctt

SEQ ID NO: 17031 - DNA, 20 bp, Artificial Sequence
  Chr18_2 Reverse Primer
acacatgcaaactgctggac

SEQ ID NO: 17032 - DNA, 20 bp, Artificial Sequence
  Chr18_2 Reverse Primer
tggctaggaacagcctcact

SEQ ID NO: 17033 - DNA, 20 bp, Artificial Sequence
  Chr18_2 Reverse Primer
ggggctccttctcgttttac

SEQ ID NO: 17034 - DNA, 20 bp, Artificial Sequence
  Chr18_2 Reverse Primer
tcagttctgtgggtgctgag

SEQ ID NO: 17035 - DNA, 20 bp, Artificial Sequence
  Chr18_2 Reverse Primer
ggctgttgagtaggagcagg

SEQ ID NO: 17036 - DNA, 20 bp, Artificial Sequence
  Chr18_2 Reverse Primer
aaaagagtgccacagccatt

SEQ ID NO: 17037 - DNA, 20 bp, Artificial Sequence
  Chr18_2 Reverse Primer
caaacagctacagtcgcagc

SEQ ID NO: 17038 - DNA, 20 bp, Artificial Sequence
  Chr18_2 Reverse Primer
tctttcaaagcaccctgacc

SEQ ID NO: 17039 - DNA, 19 bp, Artificial Sequence
  Chr18_2 Reverse Primer
acaggatggccatgtgaga

SEQ ID NO: 17040 - DNA, 20 bp, Artificial Sequence
  Chr18_2 Reverse Primer
gtagtgatgagcgggagacc

SEQ ID NO: 17041 - DNA, 20 bp, Artificial Sequence
  Chr18_2 Reverse Primer
agtcacccctacattgccag

SEQ ID NO: 17042 - DNA, 20 bp, Artificial Sequence
  Chr18_2 Reverse Primer
ataagggtctgtgggacgtg

SEQ ID NO: 17043 - DNA, 20 bp, Artificial Sequence
  Chr18_2 Reverse Primer
acgtgaccgggtaaaacttg

SEQ ID NO: 17044 - DNA, 24 bp, Artificial Sequence
  Chr18_2 Reverse Primer
cagactacatgggattttaaaggg

SEQ ID NO: 17045 - DNA, 20 bp, Artificial Sequence
  Chr18_3 Forward Primer
tgtgcagtgggtgtttgtct

SEQ ID NO: 17046 - DNA, 20 bp, Artificial Sequence
  Chr18_3 Forward Primer
atgcacctgctaaggcattc

SEQ ID NO: 17047 - DNA, 20 bp, Artificial Sequence
  Chr18_3 Forward Primer
ccaccctgtctaaaagccaa

SEQ ID NO: 17048 - DNA, 23 bp, Artificial Sequence
  Chr18_3 Forward Primer
tttcaaactttgttgttttgcac

SEQ ID NO: 17049 - DNA, 20 bp, Artificial Sequence
  Chr18_3 Forward Primer
tcaggctggttcaccaattt

SEQ ID NO: 17050 - DNA, 20 bp, Artificial Sequence
  Chr18_3 Forward Primer
ttgcaaataagggttgaggg

SEQ ID NO: 17051 - DNA, 20 bp, Artificial Sequence
  Chr18_3 Forward Primer
tggggcatgtactgctgata

SEQ ID NO: 17052 - DNA, 20 bp, Artificial Sequence
  Chr18_3 Forward Primer
tcttggaatgcagtggagaa

SEQ ID NO: 17053 - DNA, 20 bp, Artificial Sequence
  Chr18_3 Forward Primer
tcccagcttgaaggaagaaa

SEQ ID NO: 17054 - DNA, 20 bp, Artificial Sequence
  Chr18_3 Forward Primer
aggaatcataccagaggggc

SEQ ID NO: 17055 - DNA, 20 bp, Artificial Sequence
  Chr18_3 Forward Primer
aaggagcttgtatgccctga

SEQ ID NO: 17056 - DNA, 20 bp, Artificial Sequence
  Chr18_3 Forward Primer
tgggggaagcttaagactga

SEQ ID NO: 17057 - DNA, 20 bp, Artificial Sequence
  Chr18_3 Forward Primer
tcacggcttccaaaaatgat

SEQ ID NO: 17058 - DNA, 20 bp, Artificial Sequence
  Chr18_3 Forward Primer
ggattcaccacagagcaacc

SEQ ID NO: 17059 - DNA, 20 bp, Artificial Sequence
  Chr18_3 Forward Primer
ctacatgcccagctttggtt

SEQ ID NO: 17060 - DNA, 21 bp, Artificial Sequence
  Chr18_3 Forward Primer
gccatacacttggtacccatc

SEQ ID NO: 17061 - DNA, 20 bp, Artificial Sequence
  Chr18_3 Forward Primer
ggcccaagatggctgtatta

SEQ ID NO: 17062 - DNA, 20 bp, Artificial Sequence
  Chr18_3 Forward Primer
ccagctatgctaaaggctgc

SEQ ID NO: 17063 - DNA, 20 bp, Artificial Sequence
  Chr18_3 Forward Primer
tccctttgcaagatgaaggt

SEQ ID NO: 17064 - DNA, 20 bp, Artificial Sequence
  Chr18_3 Forward Primer
aggccaggaaaactagcagc

SEQ ID NO: 17065 - DNA, 20 bp, Artificial Sequence
  Chr18_3 Forward Primer
ctttgccctcttctccacag

SEQ ID NO: 17066 - DNA, 20 bp, Artificial Sequence
  Chr18_3 Forward Primer
tttgagatacacccccttgg

SEQ ID NO: 17067 - DNA, 20 bp, Artificial Sequence
  Chr18_3 Forward Primer
gttcaaaggactccacaggg

SEQ ID NO: 17068 - DNA, 22 bp, Artificial Sequence
  Chr18_3 Forward Primer
ttcctagcacacatcttgcatt

SEQ ID NO: 17069 - DNA, 21 bp, Artificial Sequence
  Chr18_3 Forward Primer
ggtgtgtgtgtatgtgtgtgg

SEQ ID NO: 17070 - DNA, 20 bp, Artificial Sequence
  Chr18_3 Forward Primer
cactgctcacacttctccca

SEQ ID NO: 17071 - DNA, 22 bp, Artificial Sequence
  Chr18_3 Forward Primer
tgaggaagcaacacttatgctg

SEQ ID NO: 17072 - DNA, 20 bp, Artificial Sequence
  Chr18_3 Forward Primer
aacccaaggcagctatcatc

SEQ ID NO: 17073 - DNA, 24 bp, Artificial Sequence
  Chr18_3 Forward Primer
tgtaagaatgaattagcctcaaca

SEQ ID NO: 17074 - DNA, 20 bp, Artificial Sequence
  Chr18_3 Forward Primer
caaaacgagtgagatggcaa

SEQ ID NO: 17075 - DNA, 20 bp, Artificial Sequence
  Chr18_3 Forward Primer
ccctgtgaactttgggtcat

SEQ ID NO: 17076 - DNA, 20 bp, Artificial Sequence
  Chr18_3 Forward Primer
ggtccaaacaattcacgtcc

SEQ ID NO: 17077 - DNA, 20 bp, Artificial Sequence
  Chr18_3 Forward Primer
tatgtccgcatgattagcca

SEQ ID NO: 17078 - DNA, 20 bp, Artificial Sequence
  Chr18_3 Forward Primer
gcacctggctggaagaatac

SEQ ID NO: 17079 - DNA, 20 bp, Artificial Sequence
  Chr18_3 Forward Primer
agatgttttgacagggcacc

SEQ ID NO: 17080 - DNA, 20 bp, Artificial Sequence
  Chr18_3 Forward Primer
gcgcagttggctttatcatt

SEQ ID NO: 17081 - DNA, 20 bp, Artificial Sequence
  Chr18_3 Forward Primer
cacacttccagtcccaggag

SEQ ID NO: 17082 - DNA, 20 bp, Artificial Sequence
  Chr18_3 Forward Primer
acagctgtcagggagattgg

SEQ ID NO: 17083 - DNA, 20 bp, Artificial Sequence
  Chr18_3 Forward Primer
aaagtgttggggtgtccaag

SEQ ID NO: 17084 - DNA, 20 bp, Artificial Sequence
  Chr18_3 Forward Primer
aggcatcctggaagaaggag

SEQ ID NO: 17085 - DNA, 20 bp, Artificial Sequence
  Chr18_3 Forward Primer
ccctgcgtatcataatggct

SEQ ID NO: 17086 - DNA, 20 bp, Artificial Sequence
  Chr18_3 Forward Primer
ggttcaggcctgtaaaccag

SEQ ID NO: 17087 - DNA, 20 bp, Artificial Sequence
  Chr18_3 Forward Primer
aaaaggagcctggagagacc

SEQ ID NO: 17088 - DNA, 20 bp, Artificial Sequence
  Chr18_3 Forward Primer
aaagcgcacaagggagttta

SEQ ID NO: 17089 - DNA, 20 bp, Artificial Sequence
  Chr18_3 Forward Primer
actgttagcagtggcagggt

SEQ ID NO: 17090 - DNA, 20 bp, Artificial Sequence
  Chr18_3 Forward Primer
tatgggatgagagaccaccc

SEQ ID NO: 17091 - DNA, 20 bp, Artificial Sequence
  Chr18_3 Forward Primer
ttttccagctttgccagagt

SEQ ID NO: 17092 - DNA, 20 bp, Artificial Sequence
  Chr18_3 Forward Primer
gcttcagtgtcggagggtat

SEQ ID NO: 17093 - DNA, 20 bp, Artificial Sequence
  Chr18_3 Forward Primer
agcaatggacagaagcatcc

SEQ ID NO: 17094 - DNA, 22 bp, Artificial Sequence
  Chr18_3 Forward Primer
aaagataggttttcccatctcc

SEQ ID NO: 17095 - DNA, 20 bp, Artificial Sequence
  Chr18_3 Forward Primer
ccctagatcctggcagttca

SEQ ID NO: 17096 - DNA, 20 bp, Artificial Sequence
  Chr18_3 Forward Primer
caaaaagaggggtctcagga

SEQ ID NO: 17097 - DNA, 20 bp, Artificial Sequence
  Chr18_3 Forward Primer
ttggagaaatagctcccctg

SEQ ID NO: 17098 - DNA, 20 bp, Artificial Sequence
  Chr18_3 Forward Primer
tcccatgaatatcccgtgtt

SEQ ID NO: 17099 - DNA, 20 bp, Artificial Sequence
  Chr18_3 Forward Primer
gccatgtgttgaggatgaaa

SEQ ID NO: 17100 - DNA, 20 bp, Artificial Sequence
  Chr18_3 Forward Primer
agagagaaggcagcgagttg

SEQ ID NO: 17101 - DNA, 20 bp, Artificial Sequence
  Chr18_3 Forward Primer
tgagctcatcctctggctta

SEQ ID NO: 17102 - DNA, 20 bp, Artificial Sequence
  Chr18_3 Forward Primer
agtggctctcctgtgcctaa

SEQ ID NO: 17103 - DNA, 20 bp, Artificial Sequence
  Chr18_3 Forward Primer
caaccccttgggctttagat

SEQ ID NO: 17104 - DNA, 22 bp, Artificial Sequence
  Chr18_3 Forward Primer
tccatcattttatagatggggc

SEQ ID NO: 17105 - DNA, 22 bp, Artificial Sequence
  Chr18_3 Forward Primer
tctggaactacatcactggtcg

SEQ ID NO: 17106 - DNA, 20 bp, Artificial Sequence
  Chr18_3 Forward Primer
cggcaaatgtcttccatttt

SEQ ID NO: 17107 - DNA, 20 bp, Artificial Sequence
  Chr18_3 Forward Primer
tggcttctaaggacccactg

SEQ ID NO: 17108 - DNA, 20 bp, Artificial Sequence
  Chr18_3 Forward Primer
tcctccttcccctgaactct

SEQ ID NO: 17109 - DNA, 20 bp, Artificial Sequence
  Chr18_3 Forward Primer
cccattaagactccctccaa

SEQ ID NO: 17110 - DNA, 20 bp, Artificial Sequence
  Chr18_3 Forward Primer
gagccaagccaaagatgttc

SEQ ID NO: 17111 - DNA, 20 bp, Artificial Sequence
  Chr18_3 Forward Primer
gtcccactccaagctgaaag

SEQ ID NO: 17112 - DNA, 20 bp, Artificial Sequence
  Chr18_3 Forward Primer
ttacagaattcccactcccg

SEQ ID NO: 17113 - DNA, 20 bp, Artificial Sequence
  Chr18_3 Forward Primer
ttgatgaaaggaagtgggct

SEQ ID NO: 17114 - DNA, 20 bp, Artificial Sequence
  Chr18_3 Forward Primer
atgatgaagcataggggtgg

SEQ ID NO: 17115 - DNA, 20 bp, Artificial Sequence
  Chr18_3 Forward Primer
ctgggcagcagaatacttcc

SEQ ID NO: 17116 - DNA, 20 bp, Artificial Sequence
  Chr18_3 Forward Primer
gcttcttattccaaagcccc

SEQ ID NO: 17117 - DNA, 20 bp, Artificial Sequence
  Chr18_3 Forward Primer
acctccttggtatcgccaat

SEQ ID NO: 17118 - DNA, 21 bp, Artificial Sequence
  Chr18_3 Forward Primer
gccttgaaagcaagagatgtg

SEQ ID NO: 17119 - DNA, 20 bp, Artificial Sequence
  Chr18_3 Forward Primer
cagcccaggttatagctcca

SEQ ID NO: 17120 - DNA, 20 bp, Artificial Sequence
  Chr18_3 Forward Primer
ccagatctagctcaagggga

SEQ ID NO: 17121 - DNA, 25 bp, Artificial Sequence
  Chr18_3 Forward Primer
tttacagagtgcctatatcaaaggt

SEQ ID NO: 17122 - DNA, 20 bp, Artificial Sequence
  Chr18_3 Forward Primer
cttacctccaagacggggat

SEQ ID NO: 17123 - DNA, 20 bp, Artificial Sequence
  Chr18_3 Forward Primer
ggtgctgtgggtgtcagtaa

SEQ ID NO: 17124 - DNA, 20 bp, Artificial Sequence
  Chr18_3 Forward Primer
gccatttacttcccctgtga

SEQ ID NO: 17125 - DNA, 21 bp, Artificial Sequence
  Chr18_3 Forward Primer
tcacctacccaatttgtcctg

SEQ ID NO: 17126 - DNA, 20 bp, Artificial Sequence
  Chr18_3 Forward Primer
aatgagtatctaggggcggg

SEQ ID NO: 17127 - DNA, 20 bp, Artificial Sequence
  Chr18_3 Forward Primer
aaaggccaaaacctgaaaaa

SEQ ID NO: 17128 - DNA, 20 bp, Artificial Sequence
  Chr18_3 Forward Primer
tataatgtgggtggggagga

SEQ ID NO: 17129 - DNA, 20 bp, Artificial Sequence
  Chr18_3 Forward Primer
tgccccacctatattggcta

SEQ ID NO: 17130 - DNA, 24 bp, Artificial Sequence
  Chr18_3 Forward Primer
ccttcaggccttatatttcttgtt

SEQ ID NO: 17131 - DNA, 20 bp, Artificial Sequence
  Chr18_3 Forward Primer
gcaatgccaagaaatgtcag

SEQ ID NO: 17132 - DNA, 21 bp, Artificial Sequence
  Chr18_3 Forward Primer
cctccatgtttttcttgtcca

SEQ ID NO: 17133 - DNA, 20 bp, Artificial Sequence
  Chr18_3 Forward Primer
accacatcgtggtcacaaat

SEQ ID NO: 17134 - DNA, 20 bp, Artificial Sequence
  Chr18_3 Forward Primer
gtctcggctttacttgtggg

SEQ ID NO: 17135 - DNA, 21 bp, Artificial Sequence
  Chr18_3 Forward Primer
caaagtagaggcatgagctgg

SEQ ID NO: 17136 - DNA, 20 bp, Artificial Sequence
  Chr18_3 Forward Primer
tgcatcaacactccggtaaa

SEQ ID NO: 17137 - DNA, 20 bp, Artificial Sequence
  Chr18_3 Forward Primer
tcctctttccgttcctacca

SEQ ID NO: 17138 - DNA, 20 bp, Artificial Sequence
  Chr18_3 Forward Primer
cacgcacacacacagagtga

SEQ ID NO: 17139 - DNA, 27 bp, Artificial Sequence
  Chr18_3 Forward Primer
ttgagagagatactcttttccttcttt

SEQ ID NO: 17140 - DNA, 20 bp, Artificial Sequence
  Chr18_3 Forward Primer
agctctatccagtcagggca

SEQ ID NO: 17141 - DNA, 24 bp, Artificial Sequence
  Chr18_3 Reverse Primer
tgttaaaacaccaaaatccagaga

SEQ ID NO: 17142 - DNA, 20 bp, Artificial Sequence
  Chr18_3 Reverse Primer
actggcttccagcatgaaat

SEQ ID NO: 17143 - DNA, 20 bp, Artificial Sequence
  Chr18_3 Reverse Primer
tcagcaagttttcagggagg

SEQ ID NO: 17144 - DNA, 21 bp, Artificial Sequence
  Chr18_3 Reverse Primer
gcagatggctaggaacagaga

SEQ ID NO: 17145 - DNA, 20 bp, Artificial Sequence
  Chr18_3 Reverse Primer
ttgctcatttgtcttggctg

SEQ ID NO: 17146 - DNA, 20 bp, Artificial Sequence
  Chr18_3 Reverse Primer
gtccccagttgttgcattct

SEQ ID NO: 17147 - DNA, 20 bp, Artificial Sequence
  Chr18_3 Reverse Primer
taacttttgcccttggcatc

SEQ ID NO: 17148 - DNA, 20 bp, Artificial Sequence
  Chr18_3 Reverse Primer
ctcactggggcatcattctt

SEQ ID NO: 17149 - DNA, 20 bp, Artificial Sequence
  Chr18_3 Reverse Primer
tcgcctctttacgttttgct

SEQ ID NO: 17150 - DNA, 20 bp, Artificial Sequence
  Chr18_3 Reverse Primer
tgaccaccaaatacttgcca

SEQ ID NO: 17151 - DNA, 20 bp, Artificial Sequence
  Chr18_3 Reverse Primer
ctcccatggtggcactatct

SEQ ID NO: 17152 - DNA, 20 bp, Artificial Sequence
  Chr18_3 Reverse Primer
ttctgtgacagctgctgatt

SEQ ID NO: 17153 - DNA, 20 bp, Artificial Sequence
  Chr18_3 Reverse Primer
tgttccagctgcttcacaac

SEQ ID NO: 17154 - DNA, 20 bp, Artificial Sequence
  Chr18_3 Reverse Primer
aagggcaaggaagagggtaa

SEQ ID NO: 17155 - DNA, 20 bp, Artificial Sequence
  Chr18_3 Reverse Primer
tgttgtagaggccaagaggg

SEQ ID NO: 17156 - DNA, 20 bp, Artificial Sequence
  Chr18_3 Reverse Primer
cacattattccagctccagg

SEQ ID NO: 17157 - DNA, 20 bp, Artificial Sequence
  Chr18_3 Reverse Primer
ccattcatgggggaagtatg

SEQ ID NO: 17158 - DNA, 20 bp, Artificial Sequence
  Chr18_3 Reverse Primer
tctattcggtctgagccagc

SEQ ID NO: 17159 - DNA, 23 bp, Artificial Sequence
  Chr18_3 Reverse Primer
aaacagaaatgtttatttcccca

SEQ ID NO: 17160 - DNA, 20 bp, Artificial Sequence
  Chr18_3 Reverse Primer
aggcataagtgactgcaccc

SEQ ID NO: 17161 - DNA, 20 bp, Artificial Sequence
  Chr18_3 Reverse Primer
accaagtgatggtgatgcaa

SEQ ID NO: 17162 - DNA, 20 bp, Artificial Sequence
  Chr18_3 Reverse Primer
attgtctcctggccctcttt

SEQ ID NO: 17163 - DNA, 20 bp, Artificial Sequence
  Chr18_3 Reverse Primer
ggaggaaaggagtttcaggc

SEQ ID NO: 17164 - DNA, 20 bp, Artificial Sequence
  Chr18_3 Reverse Primer
aaagctgccatctcaggcta

SEQ ID NO: 17165 - DNA, 20 bp, Artificial Sequence
  Chr18_3 Reverse Primer
gctccatgcagttgcctatt

SEQ ID NO: 17166 - DNA, 20 bp, Artificial Sequence
  Chr18_3 Reverse Primer
ttacacactcccgtgttcca

SEQ ID NO: 17167 - DNA, 20 bp, Artificial Sequence
  Chr18_3 Reverse Primer
aacaccaggttagaggccag

SEQ ID NO: 17168 - DNA, 20 bp, Artificial Sequence
  Chr18_3 Reverse Primer
agggagacaccaaagatgga

SEQ ID NO: 17169 - DNA, 20 bp, Artificial Sequence
  Chr18_3 Reverse Primer
atgcattgtccaggagccta

SEQ ID NO: 17170 - DNA, 20 bp, Artificial Sequence
  Chr18_3 Reverse Primer
ggccattcttttagggcaat

SEQ ID NO: 17171 - DNA, 20 bp, Artificial Sequence
  Chr18_3 Reverse Primer
ggaaggcctgggctataaac

SEQ ID NO: 17172 - DNA, 20 bp, Artificial Sequence
  Chr18_3 Reverse Primer
cacctacaggaaaccatgcc

SEQ ID NO: 17173 - DNA, 20 bp, Artificial Sequence
  Chr18_3 Reverse Primer
tgtctgaatggggaccctaa

SEQ ID NO: 17174 - DNA, 21 bp, Artificial Sequence
  Chr18_3 Reverse Primer
ccagcagctaatttgattcca

SEQ ID NO: 17175 - DNA, 20 bp, Artificial Sequence
  Chr18_3 Reverse Primer
cctcagtgggggttttcata

SEQ ID NO: 17176 - DNA, 20 bp, Artificial Sequence
  Chr18_3 Reverse Primer
atgcaacaagcatcatggag

SEQ ID NO: 17177 - DNA, 20 bp, Artificial Sequence
  Chr18_3 Reverse Primer
gccaaagagaggaatgcaag

SEQ ID NO: 17178 - DNA, 20 bp, Artificial Sequence
  Chr18_3 Reverse Primer
gcagcctgctgtgacataga

SEQ ID NO: 17179 - DNA, 20 bp, Artificial Sequence
  Chr18_3 Reverse Primer
accttctcccccagttccta

SEQ ID NO: 17180 - DNA, 20 bp, Artificial Sequence
  Chr18_3 Reverse Primer
aagcgtgtcagacccatctc

SEQ ID NO: 17181 - DNA, 20 bp, Artificial Sequence
  Chr18_3 Reverse Primer
ggtgcagaatttttggtggt

SEQ ID NO: 17182 - DNA, 20 bp, Artificial Sequence
  Chr18_3 Reverse Primer
gtaagtggcctcctgagctg

SEQ ID NO: 17183 - DNA, 20 bp, Artificial Sequence
  Chr18_3 Reverse Primer
gccttctagagagggaagcc

SEQ ID NO: 17184 - DNA, 20 bp, Artificial Sequence
  Chr18_3 Reverse Primer
gtattgcgattggtgctcct

SEQ ID NO: 17185 - DNA, 20 bp, Artificial Sequence
  Chr18_3 Reverse Primer
tccctgctattttccaggag

SEQ ID NO: 17186 - DNA, 20 bp, Artificial Sequence
  Chr18_3 Reverse Primer
tttcttcccagtggattgct

SEQ ID NO: 17187 - DNA, 20 bp, Artificial Sequence
  Chr18_3 Reverse Primer
tgtggttgtaaaacagggca

SEQ ID NO: 17188 - DNA, 20 bp, Artificial Sequence
  Chr18_3 Reverse Primer
aattggggtagatgcaaacc

SEQ ID NO: 17189 - DNA, 20 bp, Artificial Sequence
  Chr18_3 Reverse Primer
gcagcagcatttttcctctc

SEQ ID NO: 17190 - DNA, 23 bp, Artificial Sequence
  Chr18_3 Reverse Primer
cacagacaagcaacataaactgc

SEQ ID NO: 17191 - DNA, 20 bp, Artificial Sequence
  Chr18_3 Reverse Primer
caataaagtgatgctgcgga

SEQ ID NO: 17192 - DNA, 20 bp, Artificial Sequence
  Chr18_3 Reverse Primer
agccagctaatcttccctcc

SEQ ID NO: 17193 - DNA, 20 bp, Artificial Sequence
  Chr18_3 Reverse Primer
aatccattgttgagcctgga

SEQ ID NO: 17194 - DNA, 20 bp, Artificial Sequence
  Chr18_3 Reverse Primer
gcctgatttgggtgtgaact

SEQ ID NO: 17195 - DNA, 20 bp, Artificial Sequence
  Chr18_3 Reverse Primer
ccagattggtcagatggtga

SEQ ID NO: 17196 - DNA, 20 bp, Artificial Sequence
  Chr18_3 Reverse Primer
gccattttgggaaaaagaaa

SEQ ID NO: 17197 - DNA, 20 bp, Artificial Sequence
  Chr18_3 Reverse Primer
gaatacccttgaaggtggca

SEQ ID NO: 17198 - DNA, 20 bp, Artificial Sequence
  Chr18_3 Reverse Primer
cagaaagagagggcaaccag

SEQ ID NO: 17199 - DNA, 23 bp, Artificial Sequence
  Chr18_3 Reverse Primer
gtcctccattctccatagttttt

SEQ ID NO: 17200 - DNA, 20 bp, Artificial Sequence
  Chr18_3 Reverse Primer
tcactgccaccattaacacc

SEQ ID NO: 17201 - DNA, 22 bp, Artificial Sequence
  Chr18_3 Reverse Primer
tgaaggaatggaactagcagaa

SEQ ID NO: 17202 - DNA, 20 bp, Artificial Sequence
  Chr18_3 Reverse Primer
ggcagccaggaagtcagtag

SEQ ID NO: 17203 - DNA, 21 bp, Artificial Sequence
  Chr18_3 Reverse Primer
tggatttggtgggatttaaca

SEQ ID NO: 17204 - DNA, 20 bp, Artificial Sequence
  Chr18_3 Reverse Primer
gggatggcaaagccttaaat

SEQ ID NO: 17205 - DNA, 21 bp, Artificial Sequence
  Chr18_3 Reverse Primer
gtagcagcagagaaagctgga

SEQ ID NO: 17206 - DNA, 20 bp, Artificial Sequence
  Chr18_3 Reverse Primer
gcagcatagaggcatgttca

SEQ ID NO: 17207 - DNA, 20 bp, Artificial Sequence
  Chr18_3 Reverse Primer
ggaaatgcaaaccaaaacct

SEQ ID NO: 17208 - DNA, 20 bp, Artificial Sequence
  Chr18_3 Reverse Primer
aggttgagtgaaagagccga

SEQ ID NO: 17209 - DNA, 26 bp, Artificial Sequence
  Chr18_3 Reverse Primer
tgtaacagctgacagattagtgactt

SEQ ID NO: 17210 - DNA, 21 bp, Artificial Sequence
  Chr18_3 Reverse Primer
ttttctgtggcaatgattgat

SEQ ID NO: 17211 - DNA, 20 bp, Artificial Sequence
  Chr18_3 Reverse Primer
actctgtggaacacttgccc

SEQ ID NO: 17212 - DNA, 20 bp, Artificial Sequence
  Chr18_3 Reverse Primer
aattggggagtttgtcagga

SEQ ID NO: 17213 - DNA, 20 bp, Artificial Sequence
  Chr18_3 Reverse Primer
ggagctaacaggacttgcca

SEQ ID NO: 17214 - DNA, 20 bp, Artificial Sequence
  Chr18_3 Reverse Primer
aaaggaaaaggccaatgaca

SEQ ID NO: 17215 - DNA, 20 bp, Artificial Sequence
  Chr18_3 Reverse Primer
cagtttcagggcatctgtga

SEQ ID NO: 17216 - DNA, 22 bp, Artificial Sequence
  Chr18_3 Reverse Primer
tgccctagagtctttggtagga

SEQ ID NO: 17217 - DNA, 24 bp, Artificial Sequence
  Chr18_3 Reverse Primer
caactgtaatagcaaagctcagaa

SEQ ID NO: 17218 - DNA, 20 bp, Artificial Sequence
  Chr18_3 Reverse Primer
tgagaaacagtgctccaagc

SEQ ID NO: 17219 - DNA, 20 bp, Artificial Sequence
  Chr18_3 Reverse Primer
aaaagggggattcaccagtc

SEQ ID NO: 17220 - DNA, 22 bp, Artificial Sequence
  Chr18_3 Reverse Primer
ggaaaatgatacatttcagggc

SEQ ID NO: 17221 - DNA, 22 bp, Artificial Sequence
  Chr18_3 Reverse Primer
tcactgatcaaacacggttttc

SEQ ID NO: 17222 - DNA, 21 bp, Artificial Sequence
  Chr18_3 Reverse Primer
ccttgagaatctccttgagcc

SEQ ID NO: 17223 - DNA, 21 bp, Artificial Sequence
  Chr18_3 Reverse Primer
tgcatttccgactctcacttt

SEQ ID NO: 17224 - DNA, 20 bp, Artificial Sequence
  Chr18_3 Reverse Primer
ttcttgtgtcttgctgtggc

SEQ ID NO: 17225 - DNA, 21 bp, Artificial Sequence
  Chr18_3 Reverse Primer
tccttttctgggaatcaaaaa

SEQ ID NO: 17226 - DNA, 22 bp, Artificial Sequence
  Chr18_3 Reverse Primer
aaaacaccctttttgaaaacca

SEQ ID NO: 17227 - DNA, 20 bp, Artificial Sequence
  Chr18_3 Reverse Primer
caaaccccttcccagataca

SEQ ID NO: 17228 - DNA, 24 bp, Artificial Sequence
  Chr18_3 Reverse Primer
aaaatgccacacttagaaggtatc

SEQ ID NO: 17229 - DNA, 25 bp, Artificial Sequence
  Chr18_3 Reverse Primer
ttggcttatattatcaatgaacaca

SEQ ID NO: 17230 - DNA, 20 bp, Artificial Sequence
  Chr18_3 Reverse Primer
tttgcgttttgattcagcag

SEQ ID NO: 17231 - DNA, 20 bp, Artificial Sequence
  Chr18_3 Reverse Primer
cattttatggcttgcttggc

SEQ ID NO: 17232 - DNA, 20 bp, Artificial Sequence
  Chr18_3 Reverse Primer
attctcttctcccacccctc

SEQ ID NO: 17233 - DNA, 20 bp, Artificial Sequence
  Chr18_3 Reverse Primer
gtaaccgtgcttaacggcat

SEQ ID NO: 17234 - DNA, 20 bp, Artificial Sequence
  Chr18_3 Reverse Primer
tcctggcctgctttgtaact

SEQ ID NO: 17235 - DNA, 22 bp, Artificial Sequence
  Chr18_3 Reverse Primer
ttactgcatggactctttctca

SEQ ID NO: 17236 - DNA, 20 bp, Artificial Sequence
  Chr18_3 Reverse Primer
agtttgcaaccgggtatcac

SEQ ID NO: 17237 - DNA, 20 bp, Artificial Sequence
  Chr18_4 Forward Primer
cagcgcaggtaaattgaaca

SEQ ID NO: 17238 - DNA, 20 bp, Artificial Sequence
  Chr18_4 Forward Primer
gcatgccagtggtttgtgta

SEQ ID NO: 17239 - DNA, 20 bp, Artificial Sequence
  Chr18_4 Forward Primer
atccaaactcgtttgccaag

SEQ ID NO: 17240 - DNA, 20 bp, Artificial Sequence
  Chr18_4 Forward Primer
tcaggtgatgaaatgtgcaa

SEQ ID NO: 17241 - DNA, 20 bp, Artificial Sequence
  Chr18_4 Forward Primer
tcatggctagttttgtggca

SEQ ID NO: 17242 - DNA, 20 bp, Artificial Sequence
  Chr18_4 Forward Primer
aactgagcagcatgaaaacg

SEQ ID NO: 17243 - DNA, 20 bp, Artificial Sequence
  Chr18_4 Forward Primer
actgggcaaacattaggcag

SEQ ID NO: 17244 - DNA, 20 bp, Artificial Sequence
  Chr18_4 Forward Primer
cagctttaccagctcgtcct

SEQ ID NO: 17245 - DNA, 20 bp, Artificial Sequence
  Chr18_4 Forward Primer
tcttgttctaatgggagggg

SEQ ID NO: 17246 - DNA, 20 bp, Artificial Sequence
  Chr18_4 Forward Primer
gtggctgtttgactgcaaga

SEQ ID NO: 17247 - DNA, 20 bp, Artificial Sequence
  Chr18_4 Forward Primer
gacaagacagccccttgaaa

SEQ ID NO: 17248 - DNA, 23 bp, Artificial Sequence
  Chr18_4 Forward Primer
cgtcattcctaaagaggatcaag

SEQ ID NO: 17249 - DNA, 21 bp, Artificial Sequence
  Chr18_4 Forward Primer
tgtatttcaggcattggaaga

SEQ ID NO: 17250 - DNA, 21 bp, Artificial Sequence
  Chr18_4 Forward Primer
tgatggatccacaccattttt

SEQ ID NO: 17251 - DNA, 21 bp, Artificial Sequence
  Chr18_4 Forward Primer
catctcaggaaaccctcaaca

SEQ ID NO: 17252 - DNA, 25 bp, Artificial Sequence
  Chr18_4 Forward Primer
ttgaaataacaatcaagaaatccaa

SEQ ID NO: 17253 - DNA, 20 bp, Artificial Sequence
  Chr18_4 Forward Primer
agaggcgaaagaaggtcaca

SEQ ID NO: 17254 - DNA, 20 bp, Artificial Sequence
  Chr18_4 Forward Primer
gtgagagttgcacaggcaga

SEQ ID NO: 17255 - DNA, 21 bp, Artificial Sequence
  Chr18_4 Forward Primer
ttcacaaaccatttgctttcc

SEQ ID NO: 17256 - DNA, 21 bp, Artificial Sequence
  Chr18_4 Forward Primer
tcaccagtttttggacattga

SEQ ID NO: 17257 - DNA, 20 bp, Artificial Sequence
  Chr18_4 Forward Primer
caacaatctttgcctcctgg

SEQ ID NO: 17258 - DNA, 20 bp, Artificial Sequence
  Chr18_4 Forward Primer
ccccaagcaaagacaaaaca

SEQ ID NO: 17259 - DNA, 22 bp, Artificial Sequence
  Chr18_4 Forward Primer
agctaattccatgcttaggtga

SEQ ID NO: 17260 - DNA, 20 bp, Artificial Sequence
  Chr18_4 Forward Primer
ccataaaaggtggcgtcatt

SEQ ID NO: 17261 - DNA, 20 bp, Artificial Sequence
  Chr18_4 Forward Primer
ttggtttaggacaacggtgg

SEQ ID NO: 17262 - DNA, 21 bp, Artificial Sequence
  Chr18_4 Forward Primer
caattgtgggacattcctagc

SEQ ID NO: 17263 - DNA, 20 bp, Artificial Sequence
  Chr18_4 Forward Primer
agggtggttgtgaggatttg

SEQ ID NO: 17264 - DNA, 20 bp, Artificial Sequence
  Chr18_4 Forward Primer
tagctgctttccattcctgc

SEQ ID NO: 17265 - DNA, 26 bp, Artificial Sequence
  Chr18_4 Forward Primer
gaagtaacagtccctgaataactttt

SEQ ID NO: 17266 - DNA, 20 bp, Artificial Sequence
  Chr18_4 Forward Primer
ggggaaacttggacttaggg

SEQ ID NO: 17267 - DNA, 21 bp, Artificial Sequence
  Chr18_4 Forward Primer
tgcatagtcaccttgatgtgg

SEQ ID NO: 17268 - DNA, 20 bp, Artificial Sequence
  Chr18_4 Forward Primer
aagctgcttcctgaacatgg

SEQ ID NO: 17269 - DNA, 23 bp, Artificial Sequence
  Chr18_4 Forward Primer
tctctctctgattcttccatcca

SEQ ID NO: 17270 - DNA, 20 bp, Artificial Sequence
  Chr18_4 Forward Primer
tgtttcctgcttcccaattc

SEQ ID NO: 17271 - DNA, 20 bp, Artificial Sequence
  Chr18_4 Forward Primer
tttgggccacacctctttag

SEQ ID NO: 17272 - DNA, 20 bp, Artificial Sequence
  Chr18_4 Forward Primer
tcgcttttccttttcttcca

SEQ ID NO: 17273 - DNA, 20 bp, Artificial Sequence
  Chr18_4 Forward Primer
ttgcctaacaaagtgctgga

SEQ ID NO: 17274 - DNA, 20 bp, Artificial Sequence
  Chr18_4 Forward Primer
tgccctgtttctcatctgtg

SEQ ID NO: 17275 - DNA, 20 bp, Artificial Sequence
  Chr18_4 Forward Primer
aaggtaccaaggatcccacc

SEQ ID NO: 17276 - DNA, 20 bp, Artificial Sequence
  Chr18_4 Forward Primer
cccaaaaatatggcatttgg

SEQ ID NO: 17277 - DNA, 21 bp, Artificial Sequence
  Chr18_4 Forward Primer
tctgacagcaaaatggagctt

SEQ ID NO: 17278 - DNA, 24 bp, Artificial Sequence
  Chr18_4 Forward Primer
ggctaaaatctcccaaactatttc

SEQ ID NO: 17279 - DNA, 20 bp, Artificial Sequence
  Chr18_4 Forward Primer
ggtgtcatgtgttccaccaa

SEQ ID NO: 17280 - DNA, 22 bp, Artificial Sequence
  Chr18_4 Forward Primer
catgtcagaaggaatgagagca

SEQ ID NO: 17281 - DNA, 20 bp, Artificial Sequence
  Chr18_4 Forward Primer
gcccaagaaggctgtgtaga

SEQ ID NO: 17282 - DNA, 20 bp, Artificial Sequence
  Chr18_4 Forward Primer
tgctcaggggtctgattctc

SEQ ID NO: 17283 - DNA, 20 bp, Artificial Sequence
  Chr18_4 Forward Primer
taaggcctgtatgacctggc

SEQ ID NO: 17284 - DNA, 20 bp, Artificial Sequence
  Chr18_4 Forward Primer
ctctgcagctctaaccaggg

SEQ ID NO: 17285 - DNA, 21 bp, Artificial Sequence
  Chr18_4 Forward Primer
ccatggcctctgaatacttga

SEQ ID NO: 17286 - DNA, 20 bp, Artificial Sequence
  Chr18_4 Forward Primer
tcagaatttggacgaatccc

SEQ ID NO: 17287 - DNA, 22 bp, Artificial Sequence
  Chr18_4 Forward Primer
cacactctctgacaacctcaca

SEQ ID NO: 17288 - DNA, 20 bp, Artificial Sequence
  Chr18_4 Forward Primer
agacatatgggacttgggga

SEQ ID NO: 17289 - DNA, 20 bp, Artificial Sequence
  Chr18_4 Forward Primer
tggatccatcccttaagctg

SEQ ID NO: 17290 - DNA, 21 bp, Artificial Sequence
  Chr18_4 Forward Primer
ggtgtagtgggacacataggc

SEQ ID NO: 17291 - DNA, 20 bp, Artificial Sequence
  Chr18_4 Forward Primer
ccaacctgatcggaaaaatg

SEQ ID NO: 17292 - DNA, 22 bp, Artificial Sequence
  Chr18_4 Forward Primer
tttgtttgtgcttctgaggaaa

SEQ ID NO: 17293 - DNA, 20 bp, Artificial Sequence
  Chr18_4 Forward Primer
gaatagtgccaggccacact

SEQ ID NO: 17294 - DNA, 20 bp, Artificial Sequence
  Chr18_4 Forward Primer
tctcttggccaggatcaaac

SEQ ID NO: 17295 - DNA, 20 bp, Artificial Sequence
  Chr18_4 Forward Primer
gagcaggcagatcctctcag

SEQ ID NO: 17296 - DNA, 20 bp, Artificial Sequence
  Chr18_4 Forward Primer
ggccaatcaatgggaaagta

SEQ ID NO: 17297 - DNA, 20 bp, Artificial Sequence
  Chr18_4 Forward Primer
aatgcatcattgagttggca

SEQ ID NO: 17298 - DNA, 20 bp, Artificial Sequence
  Chr18_4 Forward Primer
tcaaccttggtatgcagtgg

SEQ ID NO: 17299 - DNA, 20 bp, Artificial Sequence
  Chr18_4 Forward Primer
catgactgcttggtttagcg

SEQ ID NO: 17300 - DNA, 20 bp, Artificial Sequence
  Chr18_4 Forward Primer
aaagcctttgcaagcagaaa

SEQ ID NO: 17301 - DNA, 21 bp, Artificial Sequence
  Chr18_4 Forward Primer
tcgtaatagcaatggcagtca

SEQ ID NO: 17302 - DNA, 20 bp, Artificial Sequence
  Chr18_4 Forward Primer
gcttgccttactaggcgtca

SEQ ID NO: 17303 - DNA, 20 bp, Artificial Sequence
  Chr18_4 Forward Primer
attggcagaaggttgtggag

SEQ ID NO: 17304 - DNA, 22 bp, Artificial Sequence
  Chr18_4 Forward Primer
ccatctggatgacagttattga

SEQ ID NO: 17305 - DNA, 20 bp, Artificial Sequence
  Chr18_4 Forward Primer
cagcttttctgtttttgggc

SEQ ID NO: 17306 - DNA, 20 bp, Artificial Sequence
  Chr18_4 Forward Primer
tttcctctggaaaggcaatg

SEQ ID NO: 17307 - DNA, 20 bp, Artificial Sequence
  Chr18_4 Forward Primer
cctgagccctattttgatga

SEQ ID NO: 17308 - DNA, 20 bp, Artificial Sequence
  Chr18_4 Forward Primer
gctaggatctgtggagtggg

SEQ ID NO: 17309 - DNA, 19 bp, Artificial Sequence
  Chr18_4 Forward Primer
cctggggcgtatgaaagtt

SEQ ID NO: 17310 - DNA, 21 bp, Artificial Sequence
  Chr18_4 Forward Primer
aacttcagagccttcagtcca

SEQ ID NO: 17311 - DNA, 27 bp, Artificial Sequence
  Chr18_4 Forward Primer
tcactttaccagctttatatttttcaa

SEQ ID NO: 17312 - DNA, 20 bp, Artificial Sequence
  Chr18_4 Forward Primer
ctttgttcccagtgaatcgc

SEQ ID NO: 17313 - DNA, 20 bp, Artificial Sequence
  Chr18_4 Forward Primer
tcatctttcttctgcccctt

SEQ ID NO: 17314 - DNA, 21 bp, Artificial Sequence
  Chr18_4 Forward Primer
acattctgcacacacaaaaca

SEQ ID NO: 17315 - DNA, 20 bp, Artificial Sequence
  Chr18_4 Forward Primer
acctaaccatacagccggag

SEQ ID NO: 17316 - DNA, 20 bp, Artificial Sequence
  Chr18_4 Forward Primer
tcagatttggcagtgtggag

SEQ ID NO: 17317 - DNA, 20 bp, Artificial Sequence
  Chr18_4 Forward Primer
cctttgttgaccctgatcct

SEQ ID NO: 17318 - DNA, 20 bp, Artificial Sequence
  Chr18_4 Forward Primer
tataagcaggccctcaatgc

SEQ ID NO: 17319 - DNA, 20 bp, Artificial Sequence
  Chr18_4 Forward Primer
tgagagaagcctgactgcaa

SEQ ID NO: 17320 - DNA, 20 bp, Artificial Sequence
  Chr18_4 Forward Primer
aatgcaaacctttttcctgg

SEQ ID NO: 17321 - DNA, 20 bp, Artificial Sequence
  Chr18_4 Forward Primer
cgcctggagataagctgtgt

SEQ ID NO: 17322 - DNA, 20 bp, Artificial Sequence
  Chr18_4 Forward Primer
tgacaagtgagcgtgggtag

SEQ ID NO: 17323 - DNA, 22 bp, Artificial Sequence
  Chr18_4 Forward Primer
tgagaactttgcattttgcatt

SEQ ID NO: 17324 - DNA, 20 bp, Artificial Sequence
  Chr18_4 Forward Primer
agagcagatgctcaagggaa

SEQ ID NO: 17325 - DNA, 20 bp, Artificial Sequence
  Chr18_4 Forward Primer
cagagggaatgccacagttt

SEQ ID NO: 17326 - DNA, 20 bp, Artificial Sequence
  Chr18_4 Forward Primer
agagttccccatggatgttg

SEQ ID NO: 17327 - DNA, 20 bp, Artificial Sequence
  Chr18_4 Forward Primer
gggtgggaagaagagaggtc

SEQ ID NO: 17328 - DNA, 20 bp, Artificial Sequence
  Chr18_4 Forward Primer
ccagatggtggagagttggt

SEQ ID NO: 17329 - DNA, 20 bp, Artificial Sequence
  Chr18_4 Forward Primer
ctggccttaagccttgtacg

SEQ ID NO: 17330 - DNA, 20 bp, Artificial Sequence
  Chr18_4 Forward Primer
cagttttaggggctgaccaa

SEQ ID NO: 17331 - DNA, 21 bp, Artificial Sequence
  Chr18_4 Forward Primer
cattgtccaccctaatggaga

SEQ ID NO: 17332 - DNA, 20 bp, Artificial Sequence
  Chr18_4 Forward Primer
cggttactgtgtgcctgcta

SEQ ID NO: 17333 - DNA, 20 bp, Artificial Sequence
  Chr18_4 Reverse Primer
tggctcacaatggtaactgg

SEQ ID NO: 17334 - DNA, 20 bp, Artificial Sequence
  Chr18_4 Reverse Primer
ctttgacaagggagggacaa

SEQ ID NO: 17335 - DNA, 23 bp, Artificial Sequence
  Chr18_4 Reverse Primer
tgaaaatctaacatagtgcctgc

SEQ ID NO: 17336 - DNA, 20 bp, Artificial Sequence
  Chr18_4 Reverse Primer
gagaatttccatggtggagg

SEQ ID NO: 17337 - DNA, 20 bp, Artificial Sequence
  Chr18_4 Reverse Primer
agggggaaaaagatcctcaa

SEQ ID NO: 17338 - DNA, 22 bp, Artificial Sequence
  Chr18_4 Reverse Primer
tggtacatcagtggtcaaaagg

SEQ ID NO: 17339 - DNA, 20 bp, Artificial Sequence
  Chr18_4 Reverse Primer
tcactgtgtcctcaaccacg

SEQ ID NO: 17340 - DNA, 20 bp, Artificial Sequence
  Chr18_4 Reverse Primer
aggtgaggtcaaaaatggga

SEQ ID NO: 17341 - DNA, 20 bp, Artificial Sequence
  Chr18_4 Reverse Primer
gctgcaacaccaaatcccta

SEQ ID NO: 17342 - DNA, 20 bp, Artificial Sequence
  Chr18_4 Reverse Primer
gagtcactgcatggtgttgg

SEQ ID NO: 17343 - DNA, 20 bp, Artificial Sequence
  Chr18_4 Reverse Primer
ccatttctccaggaccttca

SEQ ID NO: 17344 - DNA, 22 bp, Artificial Sequence
  Chr18_4 Reverse Primer
tttgccttaagaacaatcagca

SEQ ID NO: 17345 - DNA, 20 bp, Artificial Sequence
  Chr18_4 Reverse Primer
tgtcttgatttggctgatgg

SEQ ID NO: 17346 - DNA, 22 bp, Artificial Sequence
  Chr18_4 Reverse Primer
cctccaaaagacatgaacaaga

SEQ ID NO: 17347 - DNA, 20 bp, Artificial Sequence
  Chr18_4 Reverse Primer
tgtccatctctttggtgcat

SEQ ID NO: 17348 - DNA, 20 bp, Artificial Sequence
  Chr18_4 Reverse Primer
gggggttgaaatcctcagtg

SEQ ID NO: 17349 - DNA, 20 bp, Artificial Sequence
  Chr18_4 Reverse Primer
ggatgcttgggagttcaatg

SEQ ID NO: 17350 - DNA, 21 bp, Artificial Sequence
  Chr18_4 Reverse Primer
tttccctgaaggtaatgctca

SEQ ID NO: 17351 - DNA, 27 bp, Artificial Sequence
  Chr18_4 Reverse Primer
tgttaagagtggtgatatacttagggg

SEQ ID NO: 17352 - DNA, 20 bp, Artificial Sequence
  Chr18_4 Reverse Primer
gtgactctgcgctacctcct

SEQ ID NO: 17353 - DNA, 20 bp, Artificial Sequence
  Chr18_4 Reverse Primer
agggctgcacctattgtgtc

SEQ ID NO: 17354 - DNA, 21 bp, Artificial Sequence
  Chr18_4 Reverse Primer
ttttgatcctgacacctacgc

SEQ ID NO: 17355 - DNA, 21 bp, Artificial Sequence
  Chr18_4 Reverse Primer
cccatgaacttttgactttgc

SEQ ID NO: 17356 - DNA, 20 bp, Artificial Sequence
  Chr18_4 Reverse Primer
tgcaagatgtgtagggatgc

SEQ ID NO: 17357 - DNA, 20 bp, Artificial Sequence
  Chr18_4 Reverse Primer
tttagggctttgctggtttg

SEQ ID NO: 17358 - DNA, 20 bp, Artificial Sequence
  Chr18_4 Reverse Primer
gagccagacttggactttgc

SEQ ID NO: 17359 - DNA, 20 bp, Artificial Sequence
  Chr18_4 Reverse Primer
ccacttggcatttcattgtg

SEQ ID NO: 17360 - DNA, 21 bp, Artificial Sequence
  Chr18_4 Reverse Primer
tccttcaggaaacatgctctt

SEQ ID NO: 17361 - DNA, 20 bp, Artificial Sequence
  Chr18_4 Reverse Primer
actttgcccaactgtttgaa

SEQ ID NO: 17362 - DNA, 20 bp, Artificial Sequence
  Chr18_4 Reverse Primer
ggcagtgtttggcaatgtta

SEQ ID NO: 17363 - DNA, 21 bp, Artificial Sequence
  Chr18_4 Reverse Primer
cagatgaggaaactgaggctt

SEQ ID NO: 17364 - DNA, 20 bp, Artificial Sequence
  Chr18_4 Reverse Primer
aacacacacccctaacctgg

SEQ ID NO: 17365 - DNA, 22 bp, Artificial Sequence
  Chr18_4 Reverse Primer
gccatgtctatggctaggaaac

SEQ ID NO: 17366 - DNA, 21 bp, Artificial Sequence
  Chr18_4 Reverse Primer
agctgagcaagctgtatctgg

SEQ ID NO: 17367 - DNA, 20 bp, Artificial Sequence
  Chr18_4 Reverse Primer
cctcttcaccattcccaaga

SEQ ID NO: 17368 - DNA, 20 bp, Artificial Sequence
  Chr18_4 Reverse Primer
ttccctgctctctctcaagc

SEQ ID NO: 17369 - DNA, 20 bp, Artificial Sequence
  Chr18_4 Reverse Primer
gactgaagactccacagccc

SEQ ID NO: 17370 - DNA, 20 bp, Artificial Sequence
  Chr18_4 Reverse Primer
atctgcccaaaactgaatgt

SEQ ID NO: 17371 - DNA, 20 bp, Artificial Sequence
  Chr18_4 Reverse Primer
agtgtgctccaagcctcatt

SEQ ID NO: 17372 - DNA, 20 bp, Artificial Sequence
  Chr18_4 Reverse Primer
gcagcttcccacagagaaaa

SEQ ID NO: 17373 - DNA, 20 bp, Artificial Sequence
  Chr18_4 Reverse Primer
actcctagaaggacgtgggc

SEQ ID NO: 17374 - DNA, 26 bp, Artificial Sequence
  Chr18_4 Reverse Primer
aaacagatgagctatgaataagaaaa

SEQ ID NO: 17375 - DNA, 20 bp, Artificial Sequence
  Chr18_4 Reverse Primer
cagtgtggacacaggaagga

SEQ ID NO: 17376 - DNA, 23 bp, Artificial Sequence
  Chr18_4 Reverse Primer
ttgacacgtaagtaaaccaagca

SEQ ID NO: 17377 - DNA, 20 bp, Artificial Sequence
  Chr18_4 Reverse Primer
taagcctcaggtggagcagt

SEQ ID NO: 17378 - DNA, 20 bp, Artificial Sequence
  Chr18_4 Reverse Primer
ttgctctggtttctgggtct

SEQ ID NO: 17379 - DNA, 20 bp, Artificial Sequence
  Chr18_4 Reverse Primer
ctggggagatggtggagata

SEQ ID NO: 17380 - DNA, 24 bp, Artificial Sequence
  Chr18_4 Reverse Primer
tgcacagagaagaagtaaatgtga

SEQ ID NO: 17381 - DNA, 20 bp, Artificial Sequence
  Chr18_4 Reverse Primer
agttgcaccagaagcaatca

SEQ ID NO: 17382 - DNA, 27 bp, Artificial Sequence
  Chr18_4 Reverse Primer
gaataaagggaagaataaagaattcag

SEQ ID NO: 17383 - DNA, 20 bp, Artificial Sequence
  Chr18_4 Reverse Primer
tatggactcagggatgggtg

SEQ ID NO: 17384 - DNA, 20 bp, Artificial Sequence
  Chr18_4 Reverse Primer
gaagcacctgatcaagcaca

SEQ ID NO: 17385 - DNA, 21 bp, Artificial Sequence
  Chr18_4 Reverse Primer
caatcccagagaagagcaaca

SEQ ID NO: 17386 - DNA, 22 bp, Artificial Sequence
  Chr18_4 Reverse Primer
tggaactactggaacccctaga

SEQ ID NO: 17387 - DNA, 20 bp, Artificial Sequence
  Chr18_4 Reverse Primer
caaaaggggaaagggagagt

SEQ ID NO: 17388 - DNA, 20 bp, Artificial Sequence
  Chr18_4 Reverse Primer
aggagaatgcctttgtgctc

SEQ ID NO: 17389 - DNA, 20 bp, Artificial Sequence
  Chr18_4 Reverse Primer
tacactcacaatgggcatcc

SEQ ID NO: 17390 - DNA, 20 bp, Artificial Sequence
  Chr18_4 Reverse Primer
ccaggcttcagaatgtggtc

SEQ ID NO: 17391 - DNA, 21 bp, Artificial Sequence
  Chr18_4 Reverse Primer
tgatgcacaagaactaagcca

SEQ ID NO: 17392 - DNA, 20 bp, Artificial Sequence
  Chr18_4 Reverse Primer
tttcagctgactcccttcca

SEQ ID NO: 17393 - DNA, 20 bp, Artificial Sequence
  Chr18_4 Reverse Primer
cttctcacctgaggcaggac

SEQ ID NO: 17394 - DNA, 20 bp, Artificial Sequence
  Chr18_4 Reverse Primer
ttgctggtttagtttgctgg

SEQ ID NO: 17395 - DNA, 20 bp, Artificial Sequence
  Chr18_4 Reverse Primer
aagccatcctttcttggatt

SEQ ID NO: 17396 - DNA, 23 bp, Artificial Sequence
  Chr18_4 Reverse Primer
gattcgttttcttcacaaacaca

SEQ ID NO: 17397 - DNA, 20 bp, Artificial Sequence
  Chr18_4 Reverse Primer
caatgctagaatcggcctgt

SEQ ID NO: 17398 - DNA, 21 bp, Artificial Sequence
  Chr18_4 Reverse Primer
ggataaccagttgttccacca

SEQ ID NO: 17399 - DNA, 21 bp, Artificial Sequence
  Chr18_4 Reverse Primer
cacgcatgtcatcatttctca

SEQ ID NO: 17400 - DNA, 20 bp, Artificial Sequence
  Chr18_4 Reverse Primer
ggctcagaagagctcaaagg

SEQ ID NO: 17401 - DNA, 21 bp, Artificial Sequence
  Chr18_4 Reverse Primer
tgaaatgtttaggaacccctg

SEQ ID NO: 17402 - DNA, 20 bp, Artificial Sequence
  Chr18_4 Reverse Primer
agggagtgggaacatgtgaa

SEQ ID NO: 17403 - DNA, 22 bp, Artificial Sequence
  Chr18_4 Reverse Primer
ttgaggttagagttaccatgcc

SEQ ID NO: 17404 - DNA, 20 bp, Artificial Sequence
  Chr18_4 Reverse Primer
cttcacacatgacctgcacc

SEQ ID NO: 17405 - DNA, 24 bp, Artificial Sequence
  Chr18_4 Reverse Primer
tgttccaatttcctgaaagtaatc

SEQ ID NO: 17406 - DNA, 22 bp, Artificial Sequence
  Chr18_4 Reverse Primer
gcagcaaagtagcatatccaaa

SEQ ID NO: 17407 - DNA, 20 bp, Artificial Sequence
  Chr18_4 Reverse Primer
acacgtcagtgtgatttcca

SEQ ID NO: 17408 - DNA, 20 bp, Artificial Sequence
  Chr18_4 Reverse Primer
cccccaccaagttaaaaatc

SEQ ID NO: 17409 - DNA, 20 bp, Artificial Sequence
  Chr18_4 Reverse Primer
ccaccaaacaaaacctgacc

SEQ ID NO: 17410 - DNA, 24 bp, Artificial Sequence
  Chr18_4 Reverse Primer
tctgatcaaaccaaaagttgaaga

SEQ ID NO: 17411 - DNA, 20 bp, Artificial Sequence
  Chr18_4 Reverse Primer
taggggtttggcttttgttt

SEQ ID NO: 17412 - DNA, 20 bp, Artificial Sequence
  Chr18_4 Reverse Primer
tgcaaaacaacgctaacctg

SEQ ID NO: 17413 - DNA, 20 bp, Artificial Sequence
  Chr18_4 Reverse Primer
gaacatctgcaaaacctggg

SEQ ID NO: 17414 - DNA, 20 bp, Artificial Sequence
  Chr18_4 Reverse Primer
ccctgccacttgacagtctt

SEQ ID NO: 17415 - DNA, 20 bp, Artificial Sequence
  Chr18_4 Reverse Primer
ggagacaccatgaatccacc

SEQ ID NO: 17416 - DNA, 20 bp, Artificial Sequence
  Chr18_4 Reverse Primer
ggaggaaggaagcaagagaa

SEQ ID NO: 17417 - DNA, 21 bp, Artificial Sequence
  Chr18_4 Reverse Primer
ggatttctttccctacttggc

SEQ ID NO: 17418 - DNA, 20 bp, Artificial Sequence
  Chr18_4 Reverse Primer
tctggaacgcgctaagtaca

SEQ ID NO: 17419 - DNA, 22 bp, Artificial Sequence
  Chr18_4 Reverse Primer
tggcaactttacagtcagtgtc

SEQ ID NO: 17420 - DNA, 22 bp, Artificial Sequence
  Chr18_4 Reverse Primer
cattttctcctcctcaggtgac

SEQ ID NO: 17421 - DNA, 21 bp, Artificial Sequence
  Chr18_4 Reverse Primer
cctagccaaatgcaataacca

SEQ ID NO: 17422 - DNA, 21 bp, Artificial Sequence
  Chr18_4 Reverse Primer
ttttctcttttgggttgctca

SEQ ID NO: 17423 - DNA, 20 bp, Artificial Sequence
  Chr18_4 Reverse Primer
tttctctttccccaattccc

SEQ ID NO: 17424 - DNA, 23 bp, Artificial Sequence
  Chr18_4 Reverse Primer
gaatgaaaggctcaagaaactca

SEQ ID NO: 17425 - DNA, 20 bp, Artificial Sequence
  Chr18_4 Reverse Primer
ggacccttgaagcatgagaa

SEQ ID NO: 17426 - DNA, 20 bp, Artificial Sequence
  Chr18_4 Reverse Primer
tggttgtgagtttagccgtg

SEQ ID NO: 17427 - DNA, 20 bp, Artificial Sequence
  Chr18_4 Reverse Primer
atccacagacccagcaactc

SEQ ID NO: 17428 - DNA, 20 bp, Artificial Sequence
  Chr18_4 Reverse Primer
cgcctttctaattgagcacc

SEQ ID NO: 17429 - DNA, 19 bp, Artificial Sequence
  Chr18_5 Forward Primer
ctcaaaacatggtggctgg

SEQ ID NO: 17430 - DNA, 20 bp, Artificial Sequence
  Chr18_5 Forward Primer
gctcacatgtggatgtgtca

SEQ ID NO: 17431 - DNA, 27 bp, Artificial Sequence
  Chr18_5 Forward Primer
aacttcttctcattaaagttctgcatc

SEQ ID NO: 17432 - DNA, 20 bp, Artificial Sequence
  Chr18_5 Forward Primer
actggctctttccaaagcaa

SEQ ID NO: 17433 - DNA, 20 bp, Artificial Sequence
  Chr18_5 Forward Primer
taaggcgatgtttttggtcc

SEQ ID NO: 17434 - DNA, 20 bp, Artificial Sequence
  Chr18_5 Forward Primer
tgacacatccaatgggacag

SEQ ID NO: 17435 - DNA, 21 bp, Artificial Sequence
  Chr18_5 Forward Primer
tgaggtatgagaaggtcccaa

SEQ ID NO: 17436 - DNA, 20 bp, Artificial Sequence
  Chr18_5 Forward Primer
ttagggacagaagacggctg

SEQ ID NO: 17437 - DNA, 20 bp, Artificial Sequence
  Chr18_5 Forward Primer
ctgcttctttttgctgtccc

SEQ ID NO: 17438 - DNA, 20 bp, Artificial Sequence
  Chr18_5 Forward Primer
ctctgcgacagtttgacagc

SEQ ID NO: 17439 - DNA, 21 bp, Artificial Sequence
  Chr18_5 Forward Primer
caaagatgacctctgagctgg

SEQ ID NO: 17440 - DNA, 20 bp, Artificial Sequence
  Chr18_5 Forward Primer
cagcatcatttcacccaaga

SEQ ID NO: 17441 - DNA, 20 bp, Artificial Sequence
  Chr18_5 Forward Primer
gggaagatgggatttcctgt

SEQ ID NO: 17442 - DNA, 20 bp, Artificial Sequence
  Chr18_5 Forward Primer
gggagatggtgagcaatgat

SEQ ID NO: 17443 - DNA, 20 bp, Artificial Sequence
  Chr18_5 Forward Primer
atcgtttatgggctgagctg

SEQ ID NO: 17444 - DNA, 23 bp, Artificial Sequence
  Chr18_5 Forward Primer
tccctgagtttcctaatcattca

SEQ ID NO: 17445 - DNA, 20 bp, Artificial Sequence
  Chr18_5 Forward Primer
attccatccaaatgctgacc

SEQ ID NO: 17446 - DNA, 20 bp, Artificial Sequence
  Chr18_5 Forward Primer
tagtccccctgatgaattgc

SEQ ID NO: 17447 - DNA, 20 bp, Artificial Sequence
  Chr18_5 Forward Primer
tgaaaagctgtgtgctgtcc

SEQ ID NO: 17448 - DNA, 20 bp, Artificial Sequence
  Chr18_5 Forward Primer
tgaactatcccgcctctgtt

SEQ ID NO: 17449 - DNA, 20 bp, Artificial Sequence
  Chr18_5 Forward Primer
gaacctgcattggtcatgtg

SEQ ID NO: 17450 - DNA, 20 bp, Artificial Sequence
  Chr18_5 Forward Primer
agggaaatgaaacccctgat

SEQ ID NO: 17451 - DNA, 20 bp, Artificial Sequence
  Chr18_5 Forward Primer
attattgggtgcaggcagac

SEQ ID NO: 17452 - DNA, 20 bp, Artificial Sequence
  Chr18_5 Forward Primer
ggaagaaacggatgtgagga

SEQ ID NO: 17453 - DNA, 20 bp, Artificial Sequence
  Chr18_5 Forward Primer
ggcatgaaagagcattgaca

SEQ ID NO: 17454 - DNA, 20 bp, Artificial Sequence
  Chr18_5 Forward Primer
ggcatggtgtcacttcttca

SEQ ID NO: 17455 - DNA, 20 bp, Artificial Sequence
  Chr18_5 Forward Primer
tataggctggaggtcatggg

SEQ ID NO: 17456 - DNA, 20 bp, Artificial Sequence
  Chr18_5 Forward Primer
atttctgggaagagatgggc

SEQ ID NO: 17457 - DNA, 20 bp, Artificial Sequence
  Chr18_5 Forward Primer
atcaagccaggaaactgtgg

SEQ ID NO: 17458 - DNA, 20 bp, Artificial Sequence
  Chr18_5 Forward Primer
tagctcctaggacccccatt

SEQ ID NO: 17459 - DNA, 20 bp, Artificial Sequence
  Chr18_5 Forward Primer
tccctttgctcctgaagttg

SEQ ID NO: 17460 - DNA, 21 bp, Artificial Sequence
  Chr18_5 Forward Primer
tccccaaatcacatagttggt

SEQ ID NO: 17461 - DNA, 20 bp, Artificial Sequence
  Chr18_5 Forward Primer
atggtgggaagaagggagtc

SEQ ID NO: 17462 - DNA, 23 bp, Artificial Sequence
  Chr18_5 Forward Primer
cagtcacctagcaaagaatagca

SEQ ID NO: 17463 - DNA, 20 bp, Artificial Sequence
  Chr18_5 Forward Primer
tttgcagagaactgggcttt

SEQ ID NO: 17464 - DNA, 20 bp, Artificial Sequence
  Chr18_5 Forward Primer
agggagatgaaaactgagcg

SEQ ID NO: 17465 - DNA, 20 bp, Artificial Sequence
  Chr18_5 Forward Primer
tgcagaatgataaggccaca

SEQ ID NO: 17466 - DNA, 20 bp, Artificial Sequence
  Chr18_5 Forward Primer
gccactaattttccaccctg

SEQ ID NO: 17467 - DNA, 20 bp, Artificial Sequence
  Chr18_5 Forward Primer
ttctcctcatccttccctca

SEQ ID NO: 17468 - DNA, 20 bp, Artificial Sequence
  Chr18_5 Forward Primer
ttgcctacgtccactcttcc

SEQ ID NO: 17469 - DNA, 20 bp, Artificial Sequence
  Chr18_5 Forward Primer
gcttcctgattatttggggc

SEQ ID NO: 17470 - DNA, 20 bp, Artificial Sequence
  Chr18_5 Forward Primer
ccttcagttcatcccatgct

SEQ ID NO: 17471 - DNA, 20 bp, Artificial Sequence
  Chr18_5 Forward Primer
tgatgggttgagagtcccac

SEQ ID NO: 17472 - DNA, 20 bp, Artificial Sequence
  Chr18_5 Forward Primer
cagtccttggaatccctgaa

SEQ ID NO: 17473 - DNA, 20 bp, Artificial Sequence
  Chr18_5 Forward Primer
ggaaggctggattgagagtg

SEQ ID NO: 17474 - DNA, 20 bp, Artificial Sequence
  Chr18_5 Forward Primer
gcaatcaggtcctctctgga

SEQ ID NO: 17475 - DNA, 23 bp, Artificial Sequence
  Chr18_5 Forward Primer
ttggggaaaaggaatagaatagg

SEQ ID NO: 17476 - DNA, 20 bp, Artificial Sequence
  Chr18_5 Forward Primer
ggctgggacataaactccaa

SEQ ID NO: 17477 - DNA, 20 bp, Artificial Sequence
  Chr18_5 Forward Primer
gcaaaagtgggcctgattta

SEQ ID NO: 17478 - DNA, 20 bp, Artificial Sequence
  Chr18_5 Forward Primer
tccagaatggtgaatgagca

SEQ ID NO: 17479 - DNA, 20 bp, Artificial Sequence
  Chr18_5 Forward Primer
caggaacagagaccaaaccc

SEQ ID NO: 17480 - DNA, 20 bp, Artificial Sequence
  Chr18_5 Forward Primer
gctgagtaaggatggctgga

SEQ ID NO: 17481 - DNA, 20 bp, Artificial Sequence
  Chr18_5 Forward Primer
gagactggagcccctcttct

SEQ ID NO: 17482 - DNA, 20 bp, Artificial Sequence
  Chr18_5 Forward Primer
aagggagcaggaaagaaagc

SEQ ID NO: 17483 - DNA, 20 bp, Artificial Sequence
  Chr18_5 Forward Primer
ggtctatcatccccatgcac

SEQ ID NO: 17484 - DNA, 25 bp, Artificial Sequence
  Chr18_5 Forward Primer
tgaggattcatattcatactgagca

SEQ ID NO: 17485 - DNA, 20 bp, Artificial Sequence
  Chr18_5 Forward Primer
cgacatggagaggcaaaaat

SEQ ID NO: 17486 - DNA, 20 bp, Artificial Sequence
  Chr18_5 Forward Primer
gagagggttcaggggaaagt

SEQ ID NO: 17487 - DNA, 20 bp, Artificial Sequence
  Chr18_5 Forward Primer
ctggccatcttcctgtcatt

SEQ ID NO: 17488 - DNA, 21 bp, Artificial Sequence
  Chr18_5 Forward Primer
tggtttgcttgtcagatttca

SEQ ID NO: 17489 - DNA, 20 bp, Artificial Sequence
  Chr18_5 Forward Primer
cactggtctctgctctgctg

SEQ ID NO: 17490 - DNA, 20 bp, Artificial Sequence
  Chr18_5 Forward Primer
gaaagctagttgcagtgccc

SEQ ID NO: 17491 - DNA, 20 bp, Artificial Sequence
  Chr18_5 Forward Primer
tcagccaggtttgtcaacag

SEQ ID NO: 17492 - DNA, 20 bp, Artificial Sequence
  Chr18_5 Forward Primer
ggaaacggctgttgctattg

SEQ ID NO: 17493 - DNA, 20 bp, Artificial Sequence
  Chr18_5 Forward Primer
cccaatctctggagctgaac

SEQ ID NO: 17494 - DNA, 20 bp, Artificial Sequence
  Chr18_5 Forward Primer
tttctctgccctcacactcc

SEQ ID NO: 17495 - DNA, 21 bp, Artificial Sequence
  Chr18_5 Forward Primer
tgcccatacatgtgtgtttgt

SEQ ID NO: 17496 - DNA, 20 bp, Artificial Sequence
  Chr18_5 Forward Primer
ttggcatttgatttgggatt

SEQ ID NO: 17497 - DNA, 20 bp, Artificial Sequence
  Chr18_5 Forward Primer
tctgagggatttgttttggg

SEQ ID NO: 17498 - DNA, 20 bp, Artificial Sequence
  Chr18_5 Forward Primer
aagaaccaactggaagccct

SEQ ID NO: 17499 - DNA, 20 bp, Artificial Sequence
  Chr18_5 Forward Primer
ctccagccccaaagtcagta

SEQ ID NO: 17500 - DNA, 23 bp, Artificial Sequence
  Chr18_5 Forward Primer
ggctatttgattaagcaggatga

SEQ ID NO: 17501 - DNA, 21 bp, Artificial Sequence
  Chr18_5 Forward Primer
cccattggttcaatttccttt

SEQ ID NO: 17502 - DNA, 20 bp, Artificial Sequence
  Chr18_5 Forward Primer
gcccaatctctctctgcttg

SEQ ID NO: 17503 - DNA, 21 bp, Artificial Sequence
  Chr18_5 Forward Primer
cccactaacctgtagtgtgcc

SEQ ID NO: 17504 - DNA, 27 bp, Artificial Sequence
  Chr18_5 Forward Primer
tccaattgatgatatttgttatagctg

SEQ ID NO: 17505 - DNA, 20 bp, Artificial Sequence
  Chr18_5 Forward Primer
tagggggttagggaagacca

SEQ ID NO: 17506 - DNA, 20 bp, Artificial Sequence
  Chr18_5 Forward Primer
agctagaaaatgcaagggca

SEQ ID NO: 17507 - DNA, 20 bp, Artificial Sequence
  Chr18_5 Forward Primer
ccatctgtaggcaccacctt

SEQ ID NO: 17508 - DNA, 20 bp, Artificial Sequence
  Chr18_5 Forward Primer
ggacaaccctctgcacctta

SEQ ID NO: 17509 - DNA, 20 bp, Artificial Sequence
  Chr18_5 Forward Primer
caagcttacatcccttccca

SEQ ID NO: 17510 - DNA, 20 bp, Artificial Sequence
  Chr18_5 Forward Primer
catggcctttagatgggttg

SEQ ID NO: 17511 - DNA, 20 bp, Artificial Sequence
  Chr18_5 Forward Primer
gggtgcatatctcactggct

SEQ ID NO: 17512 - DNA, 20 bp, Artificial Sequence
  Chr18_5 Forward Primer
gcggacataagcagaggaag

SEQ ID NO: 17513 - DNA, 20 bp, Artificial Sequence
  Chr18_5 Forward Primer
aggttagtggagggtgaggg

SEQ ID NO: 17514 - DNA, 20 bp, Artificial Sequence
  Chr18_5 Forward Primer
agcaagtgcagaaagggaaa

SEQ ID NO: 17515 - DNA, 20 bp, Artificial Sequence
  Chr18_5 Forward Primer
agctgtttctaggcgaccaa

SEQ ID NO: 17516 - DNA, 20 bp, Artificial Sequence
  Chr18_5 Forward Primer
gacatggccctgttaggaaa

SEQ ID NO: 17517 - DNA, 20 bp, Artificial Sequence
  Chr18_5 Forward Primer
tacagaatgcacaatcccca

SEQ ID NO: 17518 - DNA, 20 bp, Artificial Sequence
  Chr18_5 Forward Primer
ccattggtttgaggactgct

SEQ ID NO: 17519 - DNA, 20 bp, Artificial Sequence
  Chr18_5 Forward Primer
tgtccctaagagagggggtt

SEQ ID NO: 17520 - DNA, 21 bp, Artificial Sequence
  Chr18_5 Forward Primer
gcaattgcactccaataaacc

SEQ ID NO: 17521 - DNA, 20 bp, Artificial Sequence
  Chr18_5 Forward Primer
tcctggatgagaggcaagac

SEQ ID NO: 17522 - DNA, 22 bp, Artificial Sequence
  Chr18_5 Forward Primer
tgtttgtgtgtgagtgagatgg

SEQ ID NO: 17523 - DNA, 20 bp, Artificial Sequence
  Chr18_5 Forward Primer
tgcttctttgtgagtgtggc

SEQ ID NO: 17524 - DNA, 20 bp, Artificial Sequence
  Chr18_5 Forward Primer
ttcaaccccggacatcttag

SEQ ID NO: 17525 - DNA, 20 bp, Artificial Sequence
  Chr18_5 Reverse Primer
catcctcgtgtggatctgtg

SEQ ID NO: 17526 - DNA, 20 bp, Artificial Sequence
  Chr18_5 Reverse Primer
cgattggcaaataagtgcat

SEQ ID NO: 17527 - DNA, 24 bp, Artificial Sequence
  Chr18_5 Reverse Primer
gatcgatgttaaatagaatgtggg

SEQ ID NO: 17528 - DNA, 20 bp, Artificial Sequence
  Chr18_5 Reverse Primer
gcacactcctctctgctggt

SEQ ID NO: 17529 - DNA, 20 bp, Artificial Sequence
  Chr18_5 Reverse Primer
aggccttcagaggtcgtgta

SEQ ID NO: 17530 - DNA, 20 bp, Artificial Sequence
  Chr18_5 Reverse Primer
atgctactcccctgctcaga

SEQ ID NO: 17531 - DNA, 20 bp, Artificial Sequence
  Chr18_5 Reverse Primer
ctcacttcctcatgcaccct

SEQ ID NO: 17532 - DNA, 20 bp, Artificial Sequence
  Chr18_5 Reverse Primer
ttctgggccatgaaaagttc

SEQ ID NO: 17533 - DNA, 20 bp, Artificial Sequence
  Chr18_5 Reverse Primer
cccaaatggagcagagagag

SEQ ID NO: 17534 - DNA, 20 bp, Artificial Sequence
  Chr18_5 Reverse Primer
taggtgggataggccagatg

SEQ ID NO: 17535 - DNA, 20 bp, Artificial Sequence
  Chr18_5 Reverse Primer
cacttctgcctgctttgctt

SEQ ID NO: 17536 - DNA, 20 bp, Artificial Sequence
  Chr18_5 Reverse Primer
gtcttcaacctccctccctc

SEQ ID NO: 17537 - DNA, 20 bp, Artificial Sequence
  Chr18_5 Reverse Primer
ccccagaatatgagcactgg

SEQ ID NO: 17538 - DNA, 20 bp, Artificial Sequence
  Chr18_5 Reverse Primer
tgtgggtgtccacctactca

SEQ ID NO: 17539 - DNA, 20 bp, Artificial Sequence
  Chr18_5 Reverse Primer
aaccaagagaaatagccccc

SEQ ID NO: 17540 - DNA, 20 bp, Artificial Sequence
  Chr18_5 Reverse Primer
taccattgccaggaccattt

SEQ ID NO: 17541 - DNA, 20 bp, Artificial Sequence
  Chr18_5 Reverse Primer
agacagcactggtagggtgg

SEQ ID NO: 17542 - DNA, 20 bp, Artificial Sequence
  Chr18_5 Reverse Primer
gaattccaggagagaccacg

SEQ ID NO: 17543 - DNA, 20 bp, Artificial Sequence
  Chr18_5 Reverse Primer
gagtgagcaggagagttggg

SEQ ID NO: 17544 - DNA, 20 bp, Artificial Sequence
  Chr18_5 Reverse Primer
gaggcatgtcttctgccttc

SEQ ID NO: 17545 - DNA, 20 bp, Artificial Sequence
  Chr18_5 Reverse Primer
aagccagtctcaactcagcc

SEQ ID NO: 17546 - DNA, 19 bp, Artificial Sequence
  Chr18_5 Reverse Primer
gacaggcaggtgtgcaaat

SEQ ID NO: 17547 - DNA, 20 bp, Artificial Sequence
  Chr18_5 Reverse Primer
actcctgggttggggttatc

SEQ ID NO: 17548 - DNA, 20 bp, Artificial Sequence
  Chr18_5 Reverse Primer
acgacacctttgtgggaaag

SEQ ID NO: 17549 - DNA, 20 bp, Artificial Sequence
  Chr18_5 Reverse Primer
gctccttgggttcaatgaca

SEQ ID NO: 17550 - DNA, 20 bp, Artificial Sequence
  Chr18_5 Reverse Primer
ggatttcccttcctgagctt

SEQ ID NO: 17551 - DNA, 20 bp, Artificial Sequence
  Chr18_5 Reverse Primer
aagtgggacaggctgttttg

SEQ ID NO: 17552 - DNA, 20 bp, Artificial Sequence
  Chr18_5 Reverse Primer
cagggagtatggtcctccaa

SEQ ID NO: 17553 - DNA, 20 bp, Artificial Sequence
  Chr18_5 Reverse Primer
tcttcctcaaggctttccct

SEQ ID NO: 17554 - DNA, 20 bp, Artificial Sequence
  Chr18_5 Reverse Primer
caggggagtcacagaaggag

SEQ ID NO: 17555 - DNA, 20 bp, Artificial Sequence
  Chr18_5 Reverse Primer
aagttgccaagaaagaccca

SEQ ID NO: 17556 - DNA, 20 bp, Artificial Sequence
  Chr18_5 Reverse Primer
tccctctcatttcccttgtg

SEQ ID NO: 17557 - DNA, 20 bp, Artificial Sequence
  Chr18_5 Reverse Primer
catgcctggatcctgaactt

SEQ ID NO: 17558 - DNA, 20 bp, Artificial Sequence
  Chr18_5 Reverse Primer
ggaccaaagctctgaccgta

SEQ ID NO: 17559 - DNA, 20 bp, Artificial Sequence
  Chr18_5 Reverse Primer
gccattgtactgccttccat

SEQ ID NO: 17560 - DNA, 20 bp, Artificial Sequence
  Chr18_5 Reverse Primer
catgcagaacactgtacggg

SEQ ID NO: 17561 - DNA, 20 bp, Artificial Sequence
  Chr18_5 Reverse Primer
cctgggtttcagcaatttgt

SEQ ID NO: 17562 - DNA, 20 bp, Artificial Sequence
  Chr18_5 Reverse Primer
cagggtcaggcagtaagtcc

SEQ ID NO: 17563 - DNA, 20 bp, Artificial Sequence
  Chr18_5 Reverse Primer
tccactgtatgcatgggaaa

SEQ ID NO: 17564 - DNA, 20 bp, Artificial Sequence
  Chr18_5 Reverse Primer
gtagcaggtacaaggcggag

SEQ ID NO: 17565 - DNA, 20 bp, Artificial Sequence
  Chr18_5 Reverse Primer
caggagaggaaaagccacac

SEQ ID NO: 17566 - DNA, 20 bp, Artificial Sequence
  Chr18_5 Reverse Primer
aagggtagggggatgttcag

SEQ ID NO: 17567 - DNA, 21 bp, Artificial Sequence
  Chr18_5 Reverse Primer
caacaacaaagctctgcaaaa

SEQ ID NO: 17568 - DNA, 20 bp, Artificial Sequence
  Chr18_5 Reverse Primer
ttttcaccccacgttttgat

SEQ ID NO: 17569 - DNA, 20 bp, Artificial Sequence
  Chr18_5 Reverse Primer
ctcttcctatctccaggccc

SEQ ID NO: 17570 - DNA, 20 bp, Artificial Sequence
  Chr18_5 Reverse Primer
cctctctcatttcctttgcc

SEQ ID NO: 17571 - DNA, 21 bp, Artificial Sequence
  Chr18_5 Reverse Primer
aagaacagcagtcttgccaaa

SEQ ID NO: 17572 - DNA, 20 bp, Artificial Sequence
  Chr18_5 Reverse Primer
aaccagtttggattgcaaca

SEQ ID NO: 17573 - DNA, 20 bp, Artificial Sequence
  Chr18_5 Reverse Primer
tcacctccctctgtctggtc

SEQ ID NO: 17574 - DNA, 20 bp, Artificial Sequence
  Chr18_5 Reverse Primer
acaaacttgggggtcatcaa

SEQ ID NO: 17575 - DNA, 20 bp, Artificial Sequence
  Chr18_5 Reverse Primer
acctcaaatcgcctgtcact

SEQ ID NO: 17576 - DNA, 20 bp, Artificial Sequence
  Chr18_5 Reverse Primer
accaacatgctttgggagac

SEQ ID NO: 17577 - DNA, 20 bp, Artificial Sequence
  Chr18_5 Reverse Primer
atttgggagtccaaccacag

SEQ ID NO: 17578 - DNA, 20 bp, Artificial Sequence
  Chr18_5 Reverse Primer
ctgtgcagtgatctggtgct

SEQ ID NO: 17579 - DNA, 20 bp, Artificial Sequence
  Chr18_5 Reverse Primer
tttttgagggccaagacatc

SEQ ID NO: 17580 - DNA, 20 bp, Artificial Sequence
  Chr18_5 Reverse Primer
tttcagtccaagcacagacc

SEQ ID NO: 17581 - DNA, 20 bp, Artificial Sequence
  Chr18_5 Reverse Primer
ccttactccaatcccaccct

SEQ ID NO: 17582 - DNA, 20 bp, Artificial Sequence
  Chr18_5 Reverse Primer
ttgtttagcctctagcggga

SEQ ID NO: 17583 - DNA, 20 bp, Artificial Sequence
  Chr18_5 Reverse Primer
ggctgccactgtcttctctt

SEQ ID NO: 17584 - DNA, 20 bp, Artificial Sequence
  Chr18_5 Reverse Primer
ccatggtgccaaacatattg

SEQ ID NO: 17585 - DNA, 20 bp, Artificial Sequence
  Chr18_5 Reverse Primer
tccaggtgtaaaaggccaac

SEQ ID NO: 17586 - DNA, 20 bp, Artificial Sequence
  Chr18_5 Reverse Primer
cagaggtggcccatattcat

SEQ ID NO: 17587 - DNA, 20 bp, Artificial Sequence
  Chr18_5 Reverse Primer
tgtcctctggtaggtttgcc

SEQ ID NO: 17588 - DNA, 21 bp, Artificial Sequence
  Chr18_5 Reverse Primer
tcaatggcagatcaaaacaca

SEQ ID NO: 17589 - DNA, 20 bp, Artificial Sequence
  Chr18_5 Reverse Primer
agcatttcccaagctgaaaa

SEQ ID NO: 17590 - DNA, 20 bp, Artificial Sequence
  Chr18_5 Reverse Primer
cactgaagccaaacagacca

SEQ ID NO: 17591 - DNA, 20 bp, Artificial Sequence
  Chr18_5 Reverse Primer
ttagccctgaaaatgcactg

SEQ ID NO: 17592 - DNA, 20 bp, Artificial Sequence
  Chr18_5 Reverse Primer
ggtacgggaaattgtgttgg

SEQ ID NO: 17593 - DNA, 20 bp, Artificial Sequence
  Chr18_5 Reverse Primer
tgcacctgttttctctccct

SEQ ID NO: 17594 - DNA, 20 bp, Artificial Sequence
  Chr18_5 Reverse Primer
atgtcagaactggcagggtc

SEQ ID NO: 17595 - DNA, 20 bp, Artificial Sequence
  Chr18_5 Reverse Primer
ccacacttcaaagacaggca

SEQ ID NO: 17596 - DNA, 21 bp, Artificial Sequence
  Chr18_5 Reverse Primer
gacctctccactttctccacc

SEQ ID NO: 17597 - DNA, 20 bp, Artificial Sequence
  Chr18_5 Reverse Primer
agcatgtcaatttgccacaa

SEQ ID NO: 17598 - DNA, 20 bp, Artificial Sequence
  Chr18_5 Reverse Primer
aaaggcaactgcctactcca

SEQ ID NO: 17599 - DNA, 20 bp, Artificial Sequence
  Chr18_5 Reverse Primer
gaacccagtgactccaaagc

SEQ ID NO: 17600 - DNA, 21 bp, Artificial Sequence
  Chr18_5 Reverse Primer
tggaccagtcaatactgcaca

SEQ ID NO: 17601 - DNA, 20 bp, Artificial Sequence
  Chr18_5 Reverse Primer
taggacaaagtggaggtggg

SEQ ID NO: 17602 - DNA, 20 bp, Artificial Sequence
  Chr18_5 Reverse Primer
tcctctcctctctggcttca

SEQ ID NO: 17603 - DNA, 20 bp, Artificial Sequence
  Chr18_5 Reverse Primer
ggaaataaacttcggcctcc

SEQ ID NO: 17604 - DNA, 20 bp, Artificial Sequence
  Chr18_5 Reverse Primer
ataaaaagccaaggcaccct

SEQ ID NO: 17605 - DNA, 22 bp, Artificial Sequence
  Chr18_5 Reverse Primer
tggtttacctagagctctccca

SEQ ID NO: 17606 - DNA, 20 bp, Artificial Sequence
  Chr18_5 Reverse Primer
tcacttctggatggagggac

SEQ ID NO: 17607 - DNA, 21 bp, Artificial Sequence
  Chr18_5 Reverse Primer
ggaaagtgattgtgctttcca

SEQ ID NO: 17608 - DNA, 20 bp, Artificial Sequence
  Chr18_5 Reverse Primer
gcacaggatggtgaactgtc

SEQ ID NO: 17609 - DNA, 20 bp, Artificial Sequence
  Chr18_5 Reverse Primer
ggcgcaggaagtttatgtgt

SEQ ID NO: 17610 - DNA, 20 bp, Artificial Sequence
  Chr18_5 Reverse Primer
cttggggtttgttttcctga

SEQ ID NO: 17611 - DNA, 20 bp, Artificial Sequence
  Chr18_5 Reverse Primer
tcatagaagaagcgggcatt

SEQ ID NO: 17612 - DNA, 20 bp, Artificial Sequence
  Chr18_5 Reverse Primer
tataacccctctcccatccc

SEQ ID NO: 17613 - DNA, 20 bp, Artificial Sequence
  Chr18_5 Reverse Primer
accttccccatttgtctcct

SEQ ID NO: 17614 - DNA, 20 bp, Artificial Sequence
  Chr18_5 Reverse Primer
ggcattcagttgaaaatccc

SEQ ID NO: 17615 - DNA, 20 bp, Artificial Sequence
  Chr18_5 Reverse Primer
ttcatggaactctcccaagg

SEQ ID NO: 17616 - DNA, 20 bp, Artificial Sequence
  Chr18_5 Reverse Primer
gggaagcaatcattaaccga

SEQ ID NO: 17617 - DNA, 20 bp, Artificial Sequence
  Chr18_5 Reverse Primer
ggatgtgcactcttggatga

SEQ ID NO: 17618 - DNA, 20 bp, Artificial Sequence
  Chr18_5 Reverse Primer
tccatggtgttggagagaga

SEQ ID NO: 17619 - DNA, 20 bp, Artificial Sequence
  Chr18_5 Reverse Primer
tctgtggatctctggtgctg

SEQ ID NO: 17620 - DNA, 20 bp, Artificial Sequence
  Chr18_5 Reverse Primer
cagctagtgggaccttggaa

SEQ ID NO: 17621 - DNA, 20 bp, Artificial Sequence
  Chr18_6 Forward Primer
atgtggccatacacacttcg

SEQ ID NO: 17622 - DNA, 21 bp, Artificial Sequence
  Chr18_6 Forward Primer
tgaaacaagcctaatcggtca

SEQ ID NO: 17623 - DNA, 20 bp, Artificial Sequence
  Chr18_6 Forward Primer
taaaattgggccataccacc

SEQ ID NO: 17624 - DNA, 20 bp, Artificial Sequence
  Chr18_6 Forward Primer
ctcctccagaactgtgaccc

SEQ ID NO: 17625 - DNA, 25 bp, Artificial Sequence
  Chr18_6 Forward Primer
aaaaacaataaaacatcctaagcca

SEQ ID NO: 17626 - DNA, 20 bp, Artificial Sequence
  Chr18_6 Forward Primer
cccccagcttagaaaagaca

SEQ ID NO: 17627 - DNA, 20 bp, Artificial Sequence
  Chr18_6 Forward Primer
ggaaagtttggcaaattggt

SEQ ID NO: 17628 - DNA, 20 bp, Artificial Sequence
  Chr18_6 Forward Primer
gcacaatggctgtggataaa

SEQ ID NO: 17629 - DNA, 23 bp, Artificial Sequence
  Chr18_6 Forward Primer
ccctgaaaatctattcttggtca

SEQ ID NO: 17630 - DNA, 22 bp, Artificial Sequence
  Chr18_6 Forward Primer
tgacattcacaccatcattttt

SEQ ID NO: 17631 - DNA, 20 bp, Artificial Sequence
  Chr18_6 Forward Primer
aaagaaaggcaaaagcccat

SEQ ID NO: 17632 - DNA, 19 bp, Artificial Sequence
  Chr18_6 Forward Primer
tgaaggccagcaatgaaag

SEQ ID NO: 17633 - DNA, 20 bp, Artificial Sequence
  Chr18_6 Forward Primer
gcaaagaagcccttatggtg

SEQ ID NO: 17634 - DNA, 20 bp, Artificial Sequence
  Chr18_6 Forward Primer
aagcttccttccctgctttt

SEQ ID NO: 17635 - DNA, 21 bp, Artificial Sequence
  Chr18_6 Forward Primer
tcctgtatgtgagatgagggg

SEQ ID NO: 17636 - DNA, 20 bp, Artificial Sequence
  Chr18_6 Forward Primer
ggaacagctgtactggcctc

SEQ ID NO: 17637 - DNA, 20 bp, Artificial Sequence
  Chr18_6 Forward Primer
cttgcccatttcatttcgac

SEQ ID NO: 17638 - DNA, 19 bp, Artificial Sequence
  Chr18_6 Forward Primer
cagaaatggccatgagtgc

SEQ ID NO: 17639 - DNA, 20 bp, Artificial Sequence
  Chr18_6 Forward Primer
aggaatatatggggttcccg

SEQ ID NO: 17640 - DNA, 20 bp, Artificial Sequence
  Chr18_6 Forward Primer
ttgctgggcatttcaaaagt

SEQ ID NO: 17641 - DNA, 20 bp, Artificial Sequence
  Chr18_6 Forward Primer
ttgcgacacactttaccctg

SEQ ID NO: 17642 - DNA, 20 bp, Artificial Sequence
  Chr18_6 Forward Primer
caggatccttttggtgagga

SEQ ID NO: 17643 - DNA, 21 bp, Artificial Sequence
  Chr18_6 Forward Primer
ccgaggaatctaactcagtgc

SEQ ID NO: 17644 - DNA, 20 bp, Artificial Sequence
  Chr18_6 Forward Primer
aattcaacaggggcactgag

SEQ ID NO: 17645 - DNA, 20 bp, Artificial Sequence
  Chr18_6 Forward Primer
gcctaaccttcagttttgcg

SEQ ID NO: 17646 - DNA, 21 bp, Artificial Sequence
  Chr18_6 Forward Primer
tgaacatagctgagaccctgg

SEQ ID NO: 17647 - DNA, 21 bp, Artificial Sequence
  Chr18_6 Forward Primer
ttgtttacacagatgctcccc

SEQ ID NO: 17648 - DNA, 23 bp, Artificial Sequence
  Chr18_6 Forward Primer
tttcttcacctctctgtgtctca

SEQ ID NO: 17649 - DNA, 21 bp, Artificial Sequence
  Chr18_6 Forward Primer
ggccactgggtgtgtaagtag

SEQ ID NO: 17650 - DNA, 20 bp, Artificial Sequence
  Chr18_6 Forward Primer
cgcaagtgacacaagactgc

SEQ ID NO: 17651 - DNA, 21 bp, Artificial Sequence
  Chr18_6 Forward Primer
tgtcgggtttcacttacatca

SEQ ID NO: 17652 - DNA, 22 bp, Artificial Sequence
  Chr18_6 Forward Primer
tgcctgagtattaaatggcaga

SEQ ID NO: 17653 - DNA, 20 bp, Artificial Sequence
  Chr18_6 Forward Primer
cctgagcacctgtgaaacaa

SEQ ID NO: 17654 - DNA, 22 bp, Artificial Sequence
  Chr18_6 Forward Primer
tgccatcaaaataattgttcca

SEQ ID NO: 17655 - DNA, 21 bp, Artificial Sequence
  Chr18_6 Forward Primer
tcaagtttcatccctagtggc

SEQ ID NO: 17656 - DNA, 22 bp, Artificial Sequence
  Chr18_6 Forward Primer
tgctttgaggtgcaattttatg

SEQ ID NO: 17657 - DNA, 22 bp, Artificial Sequence
  Chr18_6 Forward Primer
gcagaaattgtcagtgatctgg

SEQ ID NO: 17658 - DNA, 23 bp, Artificial Sequence
  Chr18_6 Forward Primer
ttcaaaatagcagttcccagaaa

SEQ ID NO: 17659 - DNA, 20 bp, Artificial Sequence
  Chr18_6 Forward Primer
tgagtgtttggggcatacaa

SEQ ID NO: 17660 - DNA, 20 bp, Artificial Sequence
  Chr18_6 Forward Primer
atgtgcaagcctcttgtgtg

SEQ ID NO: 17661 - DNA, 20 bp, Artificial Sequence
  Chr18_6 Forward Primer
ctcagctttcactgttcccc

SEQ ID NO: 17662 - DNA, 20 bp, Artificial Sequence
  Chr18_6 Forward Primer
gcagggatgaaccttgaaga

SEQ ID NO: 17663 - DNA, 21 bp, Artificial Sequence
  Chr18_6 Forward Primer
ggacatttaaggccattagca

SEQ ID NO: 17664 - DNA, 20 bp, Artificial Sequence
  Chr18_6 Forward Primer
aaagtttgccaggtcctcct

SEQ ID NO: 17665 - DNA, 21 bp, Artificial Sequence
  Chr18_6 Forward Primer
tggagacaaattccaccaaag

SEQ ID NO: 17666 - DNA, 27 bp, Artificial Sequence
  Chr18_6 Forward Primer
tttcatgttaatttctgttaagaatca

SEQ ID NO: 17667 - DNA, 20 bp, Artificial Sequence
  Chr18_6 Forward Primer
acgagaaattgggacgtgac

SEQ ID NO: 17668 - DNA, 20 bp, Artificial Sequence
  Chr18_6 Forward Primer
caaaacagggctaggcaatc

SEQ ID NO: 17669 - DNA, 21 bp, Artificial Sequence
  Chr18_6 Forward Primer
agcatggcagaggtctaaaaa

SEQ ID NO: 17670 - DNA, 24 bp, Artificial Sequence
  Chr18_6 Forward Primer
ttttgaattgtattttcttcctcc

SEQ ID NO: 17671 - DNA, 20 bp, Artificial Sequence
  Chr18_6 Forward Primer
cacgacatagcagcaacacc

SEQ ID NO: 17672 - DNA, 21 bp, Artificial Sequence
  Chr18_6 Forward Primer
aatccacccctaacttcaagc

SEQ ID NO: 17673 - DNA, 21 bp, Artificial Sequence
  Chr18_6 Forward Primer
tgtttggatgagctgaactga

SEQ ID NO: 17674 - DNA, 22 bp, Artificial Sequence
  Chr18_6 Forward Primer
tcacagcaaggaagaatgaaaa

SEQ ID NO: 17675 - DNA, 20 bp, Artificial Sequence
  Chr18_6 Forward Primer
tgatgcagctacctttgcag

SEQ ID NO: 17676 - DNA, 20 bp, Artificial Sequence
  Chr18_6 Forward Primer
acccagtcttccaggatgtg

SEQ ID NO: 17677 - DNA, 20 bp, Artificial Sequence
  Chr18_6 Forward Primer
accacgatcacattcgattc

SEQ ID NO: 17678 - DNA, 20 bp, Artificial Sequence
  Chr18_6 Forward Primer
ggaataccttacccatggca

SEQ ID NO: 17679 - DNA, 20 bp, Artificial Sequence
  Chr18_6 Forward Primer
aaaaacccaaaagaaaggca

SEQ ID NO: 17680 - DNA, 20 bp, Artificial Sequence
  Chr18_6 Forward Primer
tgagaaccctgcctctctgt

SEQ ID NO: 17681 - DNA, 23 bp, Artificial Sequence
  Chr18_6 Forward Primer
cgcttgattatactctgcattga

SEQ ID NO: 17682 - DNA, 20 bp, Artificial Sequence
  Chr18_6 Forward Primer
ggttaacccgctgagaactg

SEQ ID NO: 17683 - DNA, 20 bp, Artificial Sequence
  Chr18_6 Forward Primer
gctcgcctttactgattcca

SEQ ID NO: 17684 - DNA, 26 bp, Artificial Sequence
  Chr18_6 Forward Primer
cacaatgacaaactaaaacataaggc

SEQ ID NO: 17685 - DNA, 23 bp, Artificial Sequence
  Chr18_6 Forward Primer
cgaatgagtcttcatttcattgg

SEQ ID NO: 17686 - DNA, 20 bp, Artificial Sequence
  Chr18_6 Forward Primer
gcattcaaggggtcaaccta

SEQ ID NO: 17687 - DNA, 24 bp, Artificial Sequence
  Chr18_6 Forward Primer
tttctccttagacctgtttgttcc

SEQ ID NO: 17688 - DNA, 20 bp, Artificial Sequence
  Chr18_6 Forward Primer
tttccactggctgaaaaacc

SEQ ID NO: 17689 - DNA, 20 bp, Artificial Sequence
  Chr18_6 Forward Primer
catgttctgcggttatgctg

SEQ ID NO: 17690 - DNA, 20 bp, Artificial Sequence
  Chr18_6 Forward Primer
accaggttggaatgttttgg

SEQ ID NO: 17691 - DNA, 20 bp, Artificial Sequence
  Chr18_6 Forward Primer
ccaagaaagcaaaccatgaa

SEQ ID NO: 17692 - DNA, 20 bp, Artificial Sequence
  Chr18_6 Forward Primer
tcagggctttctcgattctg

SEQ ID NO: 17693 - DNA, 23 bp, Artificial Sequence
  Chr18_6 Forward Primer
ggtatctaccagactttgtggca

SEQ ID NO: 17694 - DNA, 20 bp, Artificial Sequence
  Chr18_6 Forward Primer
gaagggccattgctgactta

SEQ ID NO: 17695 - DNA, 22 bp, Artificial Sequence
  Chr18_6 Forward Primer
tctgtcctatgcttggtttcaa

SEQ ID NO: 17696 - DNA, 20 bp, Artificial Sequence
  Chr18_6 Forward Primer
agggagggctttaaggtcag

SEQ ID NO: 17697 - DNA, 20 bp, Artificial Sequence
  Chr18_6 Forward Primer
gtcccacacaaaacagtccc

SEQ ID NO: 17698 - DNA, 20 bp, Artificial Sequence
  Chr18_6 Forward Primer
cgcatgagcaaactgctact

SEQ ID NO: 17699 - DNA, 25 bp, Artificial Sequence
  Chr18_6 Forward Primer
aaaataaatgaatgcactccatagg

SEQ ID NO: 17700 - DNA, 20 bp, Artificial Sequence
  Chr18_6 Forward Primer
tggaaattacaactgcccaa

SEQ ID NO: 17701 - DNA, 27 bp, Artificial Sequence
  Chr18_6 Forward Primer
aaaacattgagacaatcagtaacctat

SEQ ID NO: 17702 - DNA, 20 bp, Artificial Sequence
  Chr18_6 Forward Primer
tttggccaggttgctatttt

SEQ ID NO: 17703 - DNA, 20 bp, Artificial Sequence
  Chr18_6 Forward Primer
tcccgctaacaatctgaacc

SEQ ID NO: 17704 - DNA, 21 bp, Artificial Sequence
  Chr18_6 Forward Primer
tggcagctaaaagaggaaatg

SEQ ID NO: 17705 - DNA, 20 bp, Artificial Sequence
  Chr18_6 Forward Primer
tatgaggaggaggatgggtg

SEQ ID NO: 17706 - DNA, 20 bp, Artificial Sequence
  Chr18_6 Forward Primer
ccacactcacccgctatctt

SEQ ID NO: 17707 - DNA, 24 bp, Artificial Sequence
  Chr18_6 Forward Primer
aagtttggaagaaatgatgtgatg

SEQ ID NO: 17708 - DNA, 21 bp, Artificial Sequence
  Chr18_6 Forward Primer
cccccagtcttctttcatttc

SEQ ID NO: 17709 - DNA, 20 bp, Artificial Sequence
  Chr18_6 Forward Primer
gcatgatttcaaccatccct

SEQ ID NO: 17710 - DNA, 25 bp, Artificial Sequence
  Chr18_6 Forward Primer
tgctgattcctaattacactctcag

SEQ ID NO: 17711 - DNA, 20 bp, Artificial Sequence
  Chr18_6 Forward Primer
gcccaggagaaacagattca

SEQ ID NO: 17712 - DNA, 20 bp, Artificial Sequence
  Chr18_6 Forward Primer
tgggtcagctagggtcaaag

SEQ ID NO: 17713 - DNA, 20 bp, Artificial Sequence
  Chr18_6 Forward Primer
gaattgctcacggttcccta

SEQ ID NO: 17714 - DNA, 20 bp, Artificial Sequence
  Chr18_6 Forward Primer
cagatgtgggagggaatgtc

SEQ ID NO: 17715 - DNA, 23 bp, Artificial Sequence
  Chr18_6 Forward Primer
gcatgaataaccaaactgtgtga

SEQ ID NO: 17716 - DNA, 24 bp, Artificial Sequence
  Chr18_6 Forward Primer
tgctgttaaaataacaaacaagca

SEQ ID NO: 17717 - DNA, 22 bp, Artificial Sequence
  Chr18_6 Reverse Primer
tctcctcaaagggaaagaaaca

SEQ ID NO: 17718 - DNA, 21 bp, Artificial Sequence
  Chr18_6 Reverse Primer
gcattgctaccaggtgtctct

SEQ ID NO: 17719 - DNA, 20 bp, Artificial Sequence
  Chr18_6 Reverse Primer
gggaccattccttggttcat

SEQ ID NO: 17720 - DNA, 20 bp, Artificial Sequence
  Chr18_6 Reverse Primer
tccccacattccatttcatt

SEQ ID NO: 17721 - DNA, 25 bp, Artificial Sequence
  Chr18_6 Reverse Primer
tcatttttatcttggaattatgcaa

SEQ ID NO: 17722 - DNA, 20 bp, Artificial Sequence
  Chr18_6 Reverse Primer
ccaggttggcccagtaataa

SEQ ID NO: 17723 - DNA, 20 bp, Artificial Sequence
  Chr18_6 Reverse Primer
aggtttccctgggtgtgagt

SEQ ID NO: 17724 - DNA, 20 bp, Artificial Sequence
  Chr18_6 Reverse Primer
cctggtcacctacctcagga

SEQ ID NO: 17725 - DNA, 20 bp, Artificial Sequence
  Chr18_6 Reverse Primer
gttctgctccaagccttttt

SEQ ID NO: 17726 - DNA, 22 bp, Artificial Sequence
  Chr18_6 Reverse Primer
tgccaataaatgttttctcaaa

SEQ ID NO: 17727 - DNA, 20 bp, Artificial Sequence
  Chr18_6 Reverse Primer
gccccctaaagaaagcaaaa

SEQ ID NO: 17728 - DNA, 21 bp, Artificial Sequence
  Chr18_6 Reverse Primer
caatttgatgtacccttggaa

SEQ ID NO: 17729 - DNA, 20 bp, Artificial Sequence
  Chr18_6 Reverse Primer
tctgttcccacattctcacg

SEQ ID NO: 17730 - DNA, 20 bp, Artificial Sequence
  Chr18_6 Reverse Primer
caaagagctgttccccaaag

SEQ ID NO: 17731 - DNA, 20 bp, Artificial Sequence
  Chr18_6 Reverse Primer
ggacgtcggatgaaaaaggt

SEQ ID NO: 17732 - DNA, 20 bp, Artificial Sequence
  Chr18_6 Reverse Primer
taagggaagcagggaaatca

SEQ ID NO: 17733 - DNA, 20 bp, Artificial Sequence
  Chr18_6 Reverse Primer
agctaaggatttgtggcacg

SEQ ID NO: 17734 - DNA, 23 bp, Artificial Sequence
  Chr18_6 Reverse Primer
tgaaagaaaaagaaggaaacctg

SEQ ID NO: 17735 - DNA, 20 bp, Artificial Sequence
  Chr18_6 Reverse Primer
cgatgcctcgttggaattat

SEQ ID NO: 17736 - DNA, 21 bp, Artificial Sequence
  Chr18_6 Reverse Primer
caggaaagcattcacatgagg

SEQ ID NO: 17737 - DNA, 21 bp, Artificial Sequence
  Chr18_6 Reverse Primer
gcaacacctcacttctccact

SEQ ID NO: 17738 - DNA, 20 bp, Artificial Sequence
  Chr18_6 Reverse Primer
accctgaacagggactgatg

SEQ ID NO: 17739 - DNA, 22 bp, Artificial Sequence
  Chr18_6 Reverse Primer
tttttgatcatcggctatgaga

SEQ ID NO: 17740 - DNA, 20 bp, Artificial Sequence
  Chr18_6 Reverse Primer
gcctggcaagatgaagatgt

SEQ ID NO: 17741 - DNA, 20 bp, Artificial Sequence
  Chr18_6 Reverse Primer
cccggagctgcttatactgt

SEQ ID NO: 17742 - DNA, 20 bp, Artificial Sequence
  Chr18_6 Reverse Primer
actcattggggtttgaatgc

SEQ ID NO: 17743 - DNA, 24 bp, Artificial Sequence
  Chr18_6 Reverse Primer
cagacactctgtagaccaaaaagc

SEQ ID NO: 17744 - DNA, 21 bp, Artificial Sequence
  Chr18_6 Reverse Primer
agtgcctgcataataaggtgg

SEQ ID NO: 17745 - DNA, 21 bp, Artificial Sequence
  Chr18_6 Reverse Primer
cacctttacgagagtgaggga

SEQ ID NO: 17746 - DNA, 20 bp, Artificial Sequence
  Chr18_6 Reverse Primer
cccaggtagaaggggaaaaa

SEQ ID NO: 17747 - DNA, 23 bp, Artificial Sequence
  Chr18_6 Reverse Primer
gaggtgtataagacattggcaca

SEQ ID NO: 17748 - DNA, 20 bp, Artificial Sequence
  Chr18_6 Reverse Primer
aggaggcagcagtgtttagc

SEQ ID NO: 17749 - DNA, 20 bp, Artificial Sequence
  Chr18_6 Reverse Primer
tccatggcccatatcattct

SEQ ID NO: 17750 - DNA, 20 bp, Artificial Sequence
  Chr18_6 Reverse Primer
gttgccatatgttggcagtg

SEQ ID NO: 17751 - DNA, 22 bp, Artificial Sequence
  Chr18_6 Reverse Primer
tgcattttgtaaaatttcaggg

SEQ ID NO: 17752 - DNA, 20 bp, Artificial Sequence
  Chr18_6 Reverse Primer
tcaggaattggagggctaaa

SEQ ID NO: 17753 - DNA, 20 bp, Artificial Sequence
  Chr18_6 Reverse Primer
cagggcttgcatgtattttg

SEQ ID NO: 17754 - DNA, 21 bp, Artificial Sequence
  Chr18_6 Reverse Primer
tctaaggagtggtgcctgatg

SEQ ID NO: 17755 - DNA, 20 bp, Artificial Sequence
  Chr18_6 Reverse Primer
cctcctcttctctgccttga

SEQ ID NO: 17756 - DNA, 22 bp, Artificial Sequence
  Chr18_6 Reverse Primer
gacttctagttcagcatgtgcg

SEQ ID NO: 17757 - DNA, 24 bp, Artificial Sequence
  Chr18_6 Reverse Primer
ttcacttttaaacttagtgtgccc

SEQ ID NO: 17758 - DNA, 20 bp, Artificial Sequence
  Chr18_6 Reverse Primer
gggaaatcagaacgatgctt

SEQ ID NO: 17759 - DNA, 20 bp, Artificial Sequence
  Chr18_6 Reverse Primer
ggtttggacgcttcaagaat

SEQ ID NO: 17760 - DNA, 20 bp, Artificial Sequence
  Chr18_6 Reverse Primer
gtctcaccatgaccccagtt

SEQ ID NO: 17761 - DNA, 26 bp, Artificial Sequence
  Chr18_6 Reverse Primer
ttgtgctgttttaagatactttcatc

SEQ ID NO: 17762 - DNA, 21 bp, Artificial Sequence
  Chr18_6 Reverse Primer
cattttggttttccatttcaa

SEQ ID NO: 17763 - DNA, 20 bp, Artificial Sequence
  Chr18_6 Reverse Primer
tctacaggacaagcacagcg

SEQ ID NO: 17764 - DNA, 20 bp, Artificial Sequence
  Chr18_6 Reverse Primer
gtggcaactcactttacccc

SEQ ID NO: 17765 - DNA, 22 bp, Artificial Sequence
  Chr18_6 Reverse Primer
tcccagctctattttcatagca

SEQ ID NO: 17766 - DNA, 23 bp, Artificial Sequence
  Chr18_6 Reverse Primer
ttcctttctttcccaataaacaa

SEQ ID NO: 17767 - DNA, 23 bp, Artificial Sequence
  Chr18_6 Reverse Primer
ccaatgctaagattaggcagaaa

SEQ ID NO: 17768 - DNA, 20 bp, Artificial Sequence
  Chr18_6 Reverse Primer
ttggtgatgttgaagaagca

SEQ ID NO: 17769 - DNA, 24 bp, Artificial Sequence
  Chr18_6 Reverse Primer
tctttgaaaagaatgctgagactt

SEQ ID NO: 17770 - DNA, 20 bp, Artificial Sequence
  Chr18_6 Reverse Primer
cccaggtccctagtacagca

SEQ ID NO: 17771 - DNA, 20 bp, Artificial Sequence
  Chr18_6 Reverse Primer
acagggcttgcaagagaatg

SEQ ID NO: 17772 - DNA, 20 bp, Artificial Sequence
  Chr18_6 Reverse Primer
ccaggtttgccatcttcagt

SEQ ID NO: 17773 - DNA, 20 bp, Artificial Sequence
  Chr18_6 Reverse Primer
ttgtcagcctggagacttcc

SEQ ID NO: 17774 - DNA, 20 bp, Artificial Sequence
  Chr18_6 Reverse Primer
aacaatcagttgggaggtgg

SEQ ID NO: 17775 - DNA, 20 bp, Artificial Sequence
  Chr18_6 Reverse Primer
ggggatgaatagttcccaga

SEQ ID NO: 17776 - DNA, 20 bp, Artificial Sequence
  Chr18_6 Reverse Primer
gggatgtgtcttagcttccg

SEQ ID NO: 17777 - DNA, 26 bp, Artificial Sequence
  Chr18_6 Reverse Primer
gggaaaacacattctgtactttatca

SEQ ID NO: 17778 - DNA, 20 bp, Artificial Sequence
  Chr18_6 Reverse Primer
agctatatggcggtggaaag

SEQ ID NO: 17779 - DNA, 20 bp, Artificial Sequence
  Chr18_6 Reverse Primer
ggcaatagttgagcatgcag

SEQ ID NO: 17780 - DNA, 23 bp, Artificial Sequence
  Chr18_6 Reverse Primer
tcattcacagctttattgatgga

SEQ ID NO: 17781 - DNA, 20 bp, Artificial Sequence
  Chr18_6 Reverse Primer
gagtgaaaacctttgccacc

SEQ ID NO: 17782 - DNA, 20 bp, Artificial Sequence
  Chr18_6 Reverse Primer
atagtccttgcgcctgcata

SEQ ID NO: 17783 - DNA, 20 bp, Artificial Sequence
  Chr18_6 Reverse Primer
tctgacgtaaaggccagaca

SEQ ID NO: 17784 - DNA, 20 bp, Artificial Sequence
  Chr18_6 Reverse Primer
taaggccaggatgaatttgc

SEQ ID NO: 17785 - DNA, 24 bp, Artificial Sequence
  Chr18_6 Reverse Primer
cagtattttaggtcttttgggaaa

SEQ ID NO: 17786 - DNA, 20 bp, Artificial Sequence
  Chr18_6 Reverse Primer
ggcagggttgagaatgtgtt

SEQ ID NO: 17787 - DNA, 20 bp, Artificial Sequence
  Chr18_6 Reverse Primer
agaaatgtaccacccaccca

SEQ ID NO: 17788 - DNA, 20 bp, Artificial Sequence
  Chr18_6 Reverse Primer
aatggaattgcagctgtgtg

SEQ ID NO: 17789 - DNA, 20 bp, Artificial Sequence
  Chr18_6 Reverse Primer
gcagcaactattcgacaggg

SEQ ID NO: 17790 - DNA, 20 bp, Artificial Sequence
  Chr18_6 Reverse Primer
ttggaccttcaggaatcagg

SEQ ID NO: 17791 - DNA, 24 bp, Artificial Sequence
  Chr18_6 Reverse Primer
cagacacaatgtgcatgatatgtt

SEQ ID NO: 17792 - DNA, 20 bp, Artificial Sequence
  Chr18_6 Reverse Primer
gtaagctctgtgctggaccc

SEQ ID NO: 17793 - DNA, 21 bp, Artificial Sequence
  Chr18_6 Reverse Primer
gccagtgtagctctaggccat

SEQ ID NO: 17794 - DNA, 20 bp, Artificial Sequence
  Chr18_6 Reverse Primer
accctcgtaagtggcaaaac

SEQ ID NO: 17795 - DNA, 19 bp, Artificial Sequence
  Chr18_6 Reverse Primer
atggcaacctttgcatcac

SEQ ID NO: 17796 - DNA, 20 bp, Artificial Sequence
  Chr18_6 Reverse Primer
atttctaccttcccgccaac

SEQ ID NO: 17797 - DNA, 20 bp, Artificial Sequence
  Chr18_6 Reverse Primer
ttggcacaaaattgctgaag

SEQ ID NO: 17798 - DNA, 20 bp, Artificial Sequence
  Chr18_6 Reverse Primer
ttatgtggggtgctgggtag

SEQ ID NO: 17799 - DNA, 21 bp, Artificial Sequence
  Chr18_6 Reverse Primer
caagaaagaatcttgggaggg

SEQ ID NO: 17800 - DNA, 21 bp, Artificial Sequence
  Chr18_6 Reverse Primer
ggtggttatgatgagcagcag

SEQ ID NO: 17801 - DNA, 20 bp, Artificial Sequence
  Chr18_6 Reverse Primer
ggcattggtcaggtcacata

SEQ ID NO: 17802 - DNA, 20 bp, Artificial Sequence
  Chr18_6 Reverse Primer
tttgcccaccaaggttagac

SEQ ID NO: 17803 - DNA, 20 bp, Artificial Sequence
  Chr18_6 Reverse Primer
accccattgtggagatcaag

SEQ ID NO: 17804 - DNA, 20 bp, Artificial Sequence
  Chr18_6 Reverse Primer
tgagggcatactgtgtaccg

SEQ ID NO: 17805 - DNA, 20 bp, Artificial Sequence
  Chr18_6 Reverse Primer
gtggaaaagaggcattgagc

SEQ ID NO: 17806 - DNA, 20 bp, Artificial Sequence
  Chr18_6 Reverse Primer
ctttttagaaccgggccctt

SEQ ID NO: 17807 - DNA, 21 bp, Artificial Sequence
  Chr18_6 Reverse Primer
tccaagtgctcaatgtcatgt

SEQ ID NO: 17808 - DNA, 20 bp, Artificial Sequence
  Chr18_6 Reverse Primer
atggtgccattctggaaaag

SEQ ID NO: 17809 - DNA, 20 bp, Artificial Sequence
  Chr18_6 Reverse Primer
ggtagaggagtggacctccc

SEQ ID NO: 17810 - DNA, 20 bp, Artificial Sequence
  Chr18_6 Reverse Primer
ttatttctgcctcagcccac

SEQ ID NO: 17811 - DNA, 20 bp, Artificial Sequence
  Chr18_6 Reverse Primer
cctggccattttcttttgac

SEQ ID NO: 17812 - DNA, 21 bp, Artificial Sequence
  Chr18_6 Reverse Primer
gcaagtcagtgtcgtatgctg

SEQ ID NO: 17813 - DNA, 20 bp, Artificial Sequence
  Chr18_7 Forward Primer
ccagagggcaaagtcaagag

SEQ ID NO: 17814 - DNA, 21 bp, Artificial Sequence
  Chr18_7 Forward Primer
tccccttccctagaatctgaa

SEQ ID NO: 17815 - DNA, 20 bp, Artificial Sequence
  Chr18_7 Forward Primer
cccttcccccattaaagact

SEQ ID NO: 17816 - DNA, 22 bp, Artificial Sequence
  Chr18_7 Forward Primer
ttttggcagactatttggtgaa

SEQ ID NO: 17817 - DNA, 23 bp, Artificial Sequence
  Chr18_7 Forward Primer
aaacaaacaaacaaaccattcca

SEQ ID NO: 17818 - DNA, 24 bp, Artificial Sequence
  Chr18_7 Forward Primer
tttgttatctgtctgtgcctaaca

SEQ ID NO: 17819 - DNA, 20 bp, Artificial Sequence
  Chr18_7 Forward Primer
tcactatccacttccagggc

SEQ ID NO: 17820 - DNA, 20 bp, Artificial Sequence
  Chr18_7 Forward Primer
tccctgggatctgaaaaaga

SEQ ID NO: 17821 - DNA, 20 bp, Artificial Sequence
  Chr18_7 Forward Primer
accattcctactgccttgct

SEQ ID NO: 17822 - DNA, 19 bp, Artificial Sequence
  Chr18_7 Forward Primer
gggtcaggcacagacactg

SEQ ID NO: 17823 - DNA, 20 bp, Artificial Sequence
  Chr18_7 Forward Primer
tgcattagctaggaggggaa

SEQ ID NO: 17824 - DNA, 20 bp, Artificial Sequence
  Chr18_7 Forward Primer
agtggaacagtgtgctggtg

SEQ ID NO: 17825 - DNA, 24 bp, Artificial Sequence
  Chr18_7 Forward Primer
ttgacctgcctattaagatctagc

SEQ ID NO: 17826 - DNA, 20 bp, Artificial Sequence
  Chr18_7 Forward Primer
gcagatttgcctggtcattt

SEQ ID NO: 17827 - DNA, 23 bp, Artificial Sequence
  Chr18_7 Forward Primer
aatggtatgtggtggtaactttg

SEQ ID NO: 17828 - DNA, 20 bp, Artificial Sequence
  Chr18_7 Forward Primer
catgtgcttgtgccaatttc

SEQ ID NO: 17829 - DNA, 20 bp, Artificial Sequence
  Chr18_7 Forward Primer
aggtagcatgtgggtcagat

SEQ ID NO: 17830 - DNA, 20 bp, Artificial Sequence
  Chr18_7 Forward Primer
gcaacttagcttggggtgat

SEQ ID NO: 17831 - DNA, 20 bp, Artificial Sequence
  Chr18_7 Forward Primer
tcttccttcccttcctcctt

SEQ ID NO: 17832 - DNA, 22 bp, Artificial Sequence
  Chr18_7 Forward Primer
caaaatggctcttttgtcactt

SEQ ID NO: 17833 - DNA, 22 bp, Artificial Sequence
  Chr18_7 Forward Primer
ttgtgaaattggagagaaatcg

SEQ ID NO: 17834 - DNA, 26 bp, Artificial Sequence
  Chr18_7 Forward Primer
gcacctcaacttatttcttatcttca

SEQ ID NO: 17835 - DNA, 20 bp, Artificial Sequence
  Chr18_7 Forward Primer
gaaggccatgaacaaaaacg

SEQ ID NO: 17836 - DNA, 20 bp, Artificial Sequence
  Chr18_7 Forward Primer
tttggctattgacctggacc

SEQ ID NO: 17837 - DNA, 20 bp, Artificial Sequence
  Chr18_7 Forward Primer
caatttgtgggcatacaggt

SEQ ID NO: 17838 - DNA, 22 bp, Artificial Sequence
  Chr18_7 Forward Primer
tcttttattggttgctttggtg

SEQ ID NO: 17839 - DNA, 20 bp, Artificial Sequence
  Chr18_7 Forward Primer
tccacttggaacacttggaa

SEQ ID NO: 17840 - DNA, 20 bp, Artificial Sequence
  Chr18_7 Forward Primer
aaaagaccatttcaggctgc

SEQ ID NO: 17841 - DNA, 26 bp, Artificial Sequence
  Chr18_7 Forward Primer
tttctatacccttcagtcattttcaa

SEQ ID NO: 17842 - DNA, 22 bp, Artificial Sequence
  Chr18_7 Forward Primer
tctctcctcaaagaaccacaca

SEQ ID NO: 17843 - DNA, 20 bp, Artificial Sequence
  Chr18_7 Forward Primer
gaacagctgggtcaggttgt

SEQ ID NO: 17844 - DNA, 21 bp, Artificial Sequence
  Chr18_7 Forward Primer
tctttcatgctggttgttgtt

SEQ ID NO: 17845 - DNA, 25 bp, Artificial Sequence
  Chr18_7 Forward Primer
tttaataaacttgacattttctccg

SEQ ID NO: 17846 - DNA, 20 bp, Artificial Sequence
  Chr18_7 Forward Primer
aaatagtgcaactgggccac

SEQ ID NO: 17847 - DNA, 20 bp, Artificial Sequence
  Chr18_7 Forward Primer
ggcttcagtgcacacaaaga

SEQ ID NO: 17848 - DNA, 21 bp, Artificial Sequence
  Chr18_7 Forward Primer
tcaccattttcattttggctt

SEQ ID NO: 17849 - DNA, 21 bp, Artificial Sequence
  Chr18_7 Forward Primer
tgagacagttgcaccttgatg

SEQ ID NO: 17850 - DNA, 22 bp, Artificial Sequence
  Chr18_7 Forward Primer
gccatgttcccctacactattt

SEQ ID NO: 17851 - DNA, 20 bp, Artificial Sequence
  Chr18_7 Forward Primer
ccagacttggctcacagaca

SEQ ID NO: 17852 - DNA, 20 bp, Artificial Sequence
  Chr18_7 Forward Primer
acagttcccctcatctgcac

SEQ ID NO: 17853 - DNA, 21 bp, Artificial Sequence
  Chr18_7 Forward Primer
tgatttcaattgatcccacaa

SEQ ID NO: 17854 - DNA, 25 bp, Artificial Sequence
  Chr18_7 Forward Primer
tgtgtccagaagattatttttgaat

SEQ ID NO: 17855 - DNA, 20 bp, Artificial Sequence
  Chr18_7 Forward Primer
cccaaaaagcaatgcaaact

SEQ ID NO: 17856 - DNA, 24 bp, Artificial Sequence
  Chr18_7 Forward Primer
agcgaaaatatattgttgatgcta

SEQ ID NO: 17857 - DNA, 23 bp, Artificial Sequence
  Chr18_7 Forward Primer
cgctagcagaattacacaatgaa

SEQ ID NO: 17858 - DNA, 23 bp, Artificial Sequence
  Chr18_7 Forward Primer
aagatgtatcagtcgaagggaca

SEQ ID NO: 17859 - DNA, 20 bp, Artificial Sequence
  Chr18_7 Forward Primer
acagcgctttattcctgtcc

SEQ ID NO: 17860 - DNA, 25 bp, Artificial Sequence
  Chr18_7 Forward Primer
aagcatattcacccaagttcttaaa

SEQ ID NO: 17861 - DNA, 24 bp, Artificial Sequence
  Chr18_7 Forward Primer
gatgcattctcctctctaatatgc

SEQ ID NO: 17862 - DNA, 20 bp, Artificial Sequence
  Chr18_7 Forward Primer
aactgcctaatgcctgccta

SEQ ID NO: 17863 - DNA, 20 bp, Artificial Sequence
  Chr18_7 Forward Primer
cctgggtagctttaggccag

SEQ ID NO: 17864 - DNA, 20 bp, Artificial Sequence
  Chr18_7 Forward Primer
ttgctgctgctatttggttt

SEQ ID NO: 17865 - DNA, 20 bp, Artificial Sequence
  Chr18_7 Forward Primer
cagccagaatccaagcctaa

SEQ ID NO: 17866 - DNA, 20 bp, Artificial Sequence
  Chr18_7 Forward Primer
agaagcggttgtcaatttgg

SEQ ID NO: 17867 - DNA, 21 bp, Artificial Sequence
  Chr18_7 Forward Primer
gaaagacagcaatgatgagcc

SEQ ID NO: 17868 - DNA, 20 bp, Artificial Sequence
  Chr18_7 Forward Primer
cctcttgagttgaaaggcca

SEQ ID NO: 17869 - DNA, 20 bp, Artificial Sequence
  Chr18_7 Forward Primer
ttcccactcaccaaacacaa

SEQ ID NO: 17870 - DNA, 20 bp, Artificial Sequence
  Chr18_7 Forward Primer
gaaccaactggaacttcgga

SEQ ID NO: 17871 - DNA, 20 bp, Artificial Sequence
  Chr18_7 Forward Primer
aacagaattcagtcccacgg

SEQ ID NO: 17872 - DNA, 23 bp, Artificial Sequence
  Chr18_7 Forward Primer
ttggtttttgaaagaatagctgc

SEQ ID NO: 17873 - DNA, 20 bp, Artificial Sequence
  Chr18_7 Forward Primer
ttgagattggctctgcaact

SEQ ID NO: 17874 - DNA, 21 bp, Artificial Sequence
  Chr18_7 Forward Primer
ttccctctctaaacattccca

SEQ ID NO: 17875 - DNA, 21 bp, Artificial Sequence
  Chr18_7 Forward Primer
aaacattgtctgaatggctgg

SEQ ID NO: 17876 - DNA, 20 bp, Artificial Sequence
  Chr18_7 Forward Primer
aggccaaaagcactgacaat

SEQ ID NO: 17877 - DNA, 20 bp, Artificial Sequence
  Chr18_7 Forward Primer
tgtgaacacgctgacaatga

SEQ ID NO: 17878 - DNA, 20 bp, Artificial Sequence
  Chr18_7 Forward Primer
tgctgcagacaggagaactg

SEQ ID NO: 17879 - DNA, 26 bp, Artificial Sequence
  Chr18_7 Forward Primer
aaaagagtggatcaatttttcttatc

SEQ ID NO: 17880 - DNA, 20 bp, Artificial Sequence
  Chr18_7 Forward Primer
gctggacacccaattaggaa

SEQ ID NO: 17881 - DNA, 24 bp, Artificial Sequence
  Chr18_7 Forward Primer
cctacttgatattagctgaacgca

SEQ ID NO: 17882 - DNA, 20 bp, Artificial Sequence
  Chr18_7 Forward Primer
gcctcaaattcaaagaggca

SEQ ID NO: 17883 - DNA, 20 bp, Artificial Sequence
  Chr18_7 Forward Primer
ttgtcctcttcttgccttcc

SEQ ID NO: 17884 - DNA, 21 bp, Artificial Sequence
  Chr18_7 Forward Primer
cacacacacacatttcccttg

SEQ ID NO: 17885 - DNA, 20 bp, Artificial Sequence
  Chr18_7 Forward Primer
caatagggagcccagtctga

SEQ ID NO: 17886 - DNA, 23 bp, Artificial Sequence
  Chr18_7 Forward Primer
catttatttcatgcaaatgctca

SEQ ID NO: 17887 - DNA, 20 bp, Artificial Sequence
  Chr18_7 Forward Primer
gatatccccaaagcagcaaa

SEQ ID NO: 17888 - DNA, 20 bp, Artificial Sequence
  Chr18_7 Forward Primer
caatcaggagccaccatctt

SEQ ID NO: 17889 - DNA, 20 bp, Artificial Sequence
  Chr18_7 Forward Primer
ttaacacttgcagcagtgcc

SEQ ID NO: 17890 - DNA, 20 bp, Artificial Sequence
  Chr18_7 Forward Primer
tgtgtctggctgcaaagaac

SEQ ID NO: 17891 - DNA, 20 bp, Artificial Sequence
  Chr18_7 Forward Primer
gcctaaggcagttctccaca

SEQ ID NO: 17892 - DNA, 26 bp, Artificial Sequence
  Chr18_7 Forward Primer
aaaagtgactgaacagagctactgaa

SEQ ID NO: 17893 - DNA, 20 bp, Artificial Sequence
  Chr18_7 Forward Primer
gcagtggcaacactacctca

SEQ ID NO: 17894 - DNA, 20 bp, Artificial Sequence
  Chr18_7 Forward Primer
ccaatgctctgtcacaccag

SEQ ID NO: 17895 - DNA, 23 bp, Artificial Sequence
  Chr18_7 Forward Primer
cctggaatagttgtcagtctcca

SEQ ID NO: 17896 - DNA, 20 bp, Artificial Sequence
  Chr18_7 Forward Primer
gctatgcctgcccaaactta

SEQ ID NO: 17897 - DNA, 20 bp, Artificial Sequence
  Chr18_7 Forward Primer
ttgacagcatttgaaggcac

SEQ ID NO: 17898 - DNA, 20 bp, Artificial Sequence
  Chr18_7 Forward Primer
aggatccctccagcactctt

SEQ ID NO: 17899 - DNA, 20 bp, Artificial Sequence
  Chr18_7 Forward Primer
aggctgtggtgttttgtcct

SEQ ID NO: 17900 - DNA, 22 bp, Artificial Sequence
  Chr18_7 Forward Primer
tgcttcagactttccatttttg

SEQ ID NO: 17901 - DNA, 20 bp, Artificial Sequence
  Chr18_7 Forward Primer
cagtttgcaggtccttggat

SEQ ID NO: 17902 - DNA, 20 bp, Artificial Sequence
  Chr18_7 Forward Primer
aacgtgctgaatctgaaggg

SEQ ID NO: 17903 - DNA, 20 bp, Artificial Sequence
  Chr18_7 Forward Primer
aggcccacctcaagttctct

SEQ ID NO: 17904 - DNA, 20 bp, Artificial Sequence
  Chr18_7 Forward Primer
aatgccagcacaggctattc

SEQ ID NO: 17905 - DNA, 20 bp, Artificial Sequence
  Chr18_7 Forward Primer
gccatgtgcaaaaagacagt

SEQ ID NO: 17906 - DNA, 19 bp, Artificial Sequence
  Chr18_7 Forward Primer
gccaagatgcttgtgcatt

SEQ ID NO: 17907 - DNA, 20 bp, Artificial Sequence
  Chr18_7 Forward Primer
aaaaacccatccacgatcac

SEQ ID NO: 17908 - DNA, 24 bp, Artificial Sequence
  Chr18_7 Forward Primer
tttcctgtgtagagtttgcttttg

SEQ ID NO: 17909 - DNA, 20 bp, Artificial Sequence
  Chr18_7 Reverse Primer
tccaaatcaaattcaggtgc

SEQ ID NO: 17910 - DNA, 20 bp, Artificial Sequence
  Chr18_7 Reverse Primer
ggcagagcatctggataagg

SEQ ID NO: 17911 - DNA, 20 bp, Artificial Sequence
  Chr18_7 Reverse Primer
tctcccaaaactcagtggct

SEQ ID NO: 17912 - DNA, 20 bp, Artificial Sequence
  Chr18_7 Reverse Primer
gtcagcagcttggaggagag

SEQ ID NO: 17913 - DNA, 21 bp, Artificial Sequence
  Chr18_7 Reverse Primer
agttagagaaggcctcttggg

SEQ ID NO: 17914 - DNA, 20 bp, Artificial Sequence
  Chr18_7 Reverse Primer
cgtgaaagcaaggacatcaa

SEQ ID NO: 17915 - DNA, 22 bp, Artificial Sequence
  Chr18_7 Reverse Primer
gaaaaggataaatcctgcacca

SEQ ID NO: 17916 - DNA, 22 bp, Artificial Sequence
  Chr18_7 Reverse Primer
cagaaggtcagtaattgcaagg

SEQ ID NO: 17917 - DNA, 22 bp, Artificial Sequence
  Chr18_7 Reverse Primer
aatcattgaatgggtgagagaa

SEQ ID NO: 17918 - DNA, 20 bp, Artificial Sequence
  Chr18_7 Reverse Primer
ttttctgggccttggattat

SEQ ID NO: 17919 - DNA, 21 bp, Artificial Sequence
  Chr18_7 Reverse Primer
cagagacacatggaagcaaca

SEQ ID NO: 17920 - DNA, 20 bp, Artificial Sequence
  Chr18_7 Reverse Primer
taatggggagattggcaaag

SEQ ID NO: 17921 - DNA, 27 bp, Artificial Sequence
  Chr18_7 Reverse Primer
ggtaggaattaatacagaaatcctttt

SEQ ID NO: 17922 - DNA, 20 bp, Artificial Sequence
  Chr18_7 Reverse Primer
tggaggtgcttctatggaca

SEQ ID NO: 17923 - DNA, 24 bp, Artificial Sequence
  Chr18_7 Reverse Primer
tctgcctacacgtttagaagaaaa

SEQ ID NO: 17924 - DNA, 22 bp, Artificial Sequence
  Chr18_7 Reverse Primer
tgaaatatttttccatgccttg

SEQ ID NO: 17925 - DNA, 23 bp, Artificial Sequence
  Chr18_7 Reverse Primer
ccgaggtaaagaaaatagtccaa

SEQ ID NO: 17926 - DNA, 22 bp, Artificial Sequence
  Chr18_7 Reverse Primer
gaggagaagaggcagaatgaaa

SEQ ID NO: 17927 - DNA, 21 bp, Artificial Sequence
  Chr18_7 Reverse Primer
tttggaatgaaagcaaatgaa

SEQ ID NO: 17928 - DNA, 22 bp, Artificial Sequence
  Chr18_7 Reverse Primer
aacgtttcttttctcaggaaca

SEQ ID NO: 17929 - DNA, 26 bp, Artificial Sequence
  Chr18_7 Reverse Primer
tacatgacatgattcaaaagtaagaa

SEQ ID NO: 17930 - DNA, 23 bp, Artificial Sequence
  Chr18_7 Reverse Primer
tgcaaacactagatcaaaaacca

SEQ ID NO: 17931 - DNA, 20 bp, Artificial Sequence
  Chr18_7 Reverse Primer
ttaatgccacatgaagcagg

SEQ ID NO: 17932 - DNA, 20 bp, Artificial Sequence
  Chr18_7 Reverse Primer
tgtgatggctttgatgagga

SEQ ID NO: 17933 - DNA, 21 bp, Artificial Sequence
  Chr18_7 Reverse Primer
tattattccgtgaaagcctca

SEQ ID NO: 17934 - DNA, 20 bp, Artificial Sequence
  Chr18_7 Reverse Primer
aagagtaggtgccccaatga

SEQ ID NO: 17935 - DNA, 25 bp, Artificial Sequence
  Chr18_7 Reverse Primer
ttcattctggaacagttttcttttt

SEQ ID NO: 17936 - DNA, 20 bp, Artificial Sequence
  Chr18_7 Reverse Primer
ggcctttcgtatgtgtgctt

SEQ ID NO: 17937 - DNA, 24 bp, Artificial Sequence
  Chr18_7 Reverse Primer
tgagagttccacaaatgagttttc

SEQ ID NO: 17938 - DNA, 23 bp, Artificial Sequence
  Chr18_7 Reverse Primer
tgggatttatttaagatggcttg

SEQ ID NO: 17939 - DNA, 21 bp, Artificial Sequence
  Chr18_7 Reverse Primer
cctcaaaaatgcatgctaaaa

SEQ ID NO: 17940 - DNA, 25 bp, Artificial Sequence
  Chr18_7 Reverse Primer
tcatcagttaaagtccaacttgaca

SEQ ID NO: 17941 - DNA, 20 bp, Artificial Sequence
  Chr18_7 Reverse Primer
aatggcataaagagaggcca

SEQ ID NO: 17942 - DNA, 20 bp, Artificial Sequence
  Chr18_7 Reverse Primer
ccaaacgacaaatcctgctt

SEQ ID NO: 17943 - DNA, 21 bp, Artificial Sequence
  Chr18_7 Reverse Primer
caagtgtggacagatcactgg

SEQ ID NO: 17944 - DNA, 21 bp, Artificial Sequence
  Chr18_7 Reverse Primer
tcaagtgaaacactgagggct

SEQ ID NO: 17945 - DNA, 21 bp, Artificial Sequence
  Chr18_7 Reverse Primer
gcattgtgactctgaaatgct

SEQ ID NO: 17946 - DNA, 20 bp, Artificial Sequence
  Chr18_7 Reverse Primer
tttatccacgagacttgcca

SEQ ID NO: 17947 - DNA, 20 bp, Artificial Sequence
  Chr18_7 Reverse Primer
tcctgccgttttatggactc

SEQ ID NO: 17948 - DNA, 22 bp, Artificial Sequence
  Chr18_7 Reverse Primer
cgacgatgtttttctttgtgtt

SEQ ID NO: 17949 - DNA, 22 bp, Artificial Sequence
  Chr18_7 Reverse Primer
gcgaagcatgacaaaagtagtc

SEQ ID NO: 17950 - DNA, 22 bp, Artificial Sequence
  Chr18_7 Reverse Primer
tttagtaaaacttggtggcagc

SEQ ID NO: 17951 - DNA, 20 bp, Artificial Sequence
  Chr18_7 Reverse Primer
gttacgaggctgtcggtgtt

SEQ ID NO: 17952 - DNA, 22 bp, Artificial Sequence
  Chr18_7 Reverse Primer
tttgctttagtcagcagaatgc

SEQ ID NO: 17953 - DNA, 20 bp, Artificial Sequence
  Chr18_7 Reverse Primer
ggggtcaataatgttttggg

SEQ ID NO: 17954 - DNA, 20 bp, Artificial Sequence
  Chr18_7 Reverse Primer
tatgtgttggcaaggagcaa

SEQ ID NO: 17955 - DNA, 24 bp, Artificial Sequence
  Chr18_7 Reverse Primer
cagcagataataaagcaaaggtca

SEQ ID NO: 17956 - DNA, 22 bp, Artificial Sequence
  Chr18_7 Reverse Primer
tctctgaaaacacttgcacaca

SEQ ID NO: 17957 - DNA, 20 bp, Artificial Sequence
  Chr18_7 Reverse Primer
cacctggatgtccaattcaa

SEQ ID NO: 17958 - DNA, 20 bp, Artificial Sequence
  Chr18_7 Reverse Primer
tggctgaccttcagtcatca

SEQ ID NO: 17959 - DNA, 20 bp, Artificial Sequence
  Chr18_7 Reverse Primer
agctcatcactctgttgcca

SEQ ID NO: 17960 - DNA, 20 bp, Artificial Sequence
  Chr18_7 Reverse Primer
ggagcagactgcaaatgaca

SEQ ID NO: 17961 - DNA, 22 bp, Artificial Sequence
  Chr18_7 Reverse Primer
ggttcacaaaatgactgagagc

SEQ ID NO: 17962 - DNA, 21 bp, Artificial Sequence
  Chr18_7 Reverse Primer
tctttggggacataaaggaca

SEQ ID NO: 17963 - DNA, 23 bp, Artificial Sequence
  Chr18_7 Reverse Primer
ttgcagaataactctacttggca

SEQ ID NO: 17964 - DNA, 20 bp, Artificial Sequence
  Chr18_7 Reverse Primer
cgattttctagccaggcatc

SEQ ID NO: 17965 - DNA, 20 bp, Artificial Sequence
  Chr18_7 Reverse Primer
ggaaatttgaaagcgcaaag

SEQ ID NO: 17966 - DNA, 20 bp, Artificial Sequence
  Chr18_7 Reverse Primer
gccttgtttttgccatgact

SEQ ID NO: 17967 - DNA, 19 bp, Artificial Sequence
  Chr18_7 Reverse Primer
ccttggtcggttcttggat

SEQ ID NO: 17968 - DNA, 21 bp, Artificial Sequence
  Chr18_7 Reverse Primer
tgtcagggaatggagtgtctc

SEQ ID NO: 17969 - DNA, 23 bp, Artificial Sequence
  Chr18_7 Reverse Primer
gcaatttgactcatttttcattg

SEQ ID NO: 17970 - DNA, 20 bp, Artificial Sequence
  Chr18_7 Reverse Primer
cccggatgaagaaactgaaa

SEQ ID NO: 17971 - DNA, 22 bp, Artificial Sequence
  Chr18_7 Reverse Primer
ccagttgagatctgttgcatgt

SEQ ID NO: 17972 - DNA, 20 bp, Artificial Sequence
  Chr18_7 Reverse Primer
tatggctcatcaccttggaa

SEQ ID NO: 17973 - DNA, 20 bp, Artificial Sequence
  Chr18_7 Reverse Primer
gaccctgttttgcagagctt

SEQ ID NO: 17974 - DNA, 22 bp, Artificial Sequence
  Chr18_7 Reverse Primer
cttggcaaggtccatgatatag

SEQ ID NO: 17975 - DNA, 24 bp, Artificial Sequence
  Chr18_7 Reverse Primer
aactcagatgcaaagaaataaagc

SEQ ID NO: 17976 - DNA, 22 bp, Artificial Sequence
  Chr18_7 Reverse Primer
agtgtagaggtttggcactcaa

SEQ ID NO: 17977 - DNA, 24 bp, Artificial Sequence
  Chr18_7 Reverse Primer
ttcagagacacacttcacttgtca

SEQ ID NO: 17978 - DNA, 20 bp, Artificial Sequence
  Chr18_7 Reverse Primer
agcatcaaggggctgttatg

SEQ ID NO: 17979 - DNA, 20 bp, Artificial Sequence
  Chr18_7 Reverse Primer
ggaaagaggaatggatgtgg

SEQ ID NO: 17980 - DNA, 20 bp, Artificial Sequence
  Chr18_7 Reverse Primer
ttttctttttgtgccatccc

SEQ ID NO: 17981 - DNA, 20 bp, Artificial Sequence
  Chr18_7 Reverse Primer
tcatgtggccaggattgtaa

SEQ ID NO: 17982 - DNA, 20 bp, Artificial Sequence
  Chr18_7 Reverse Primer
attagccgcatgattctggt

SEQ ID NO: 17983 - DNA, 20 bp, Artificial Sequence
  Chr18_7 Reverse Primer
tggcaacatatccaccatca

SEQ ID NO: 17984 - DNA, 20 bp, Artificial Sequence
  Chr18_7 Reverse Primer
atggttactctgctcggtgg

SEQ ID NO: 17985 - DNA, 20 bp, Artificial Sequence
  Chr18_7 Reverse Primer
gaccatggtgatatcctggc

SEQ ID NO: 17986 - DNA, 20 bp, Artificial Sequence
  Chr18_7 Reverse Primer
ggccgcttatgagattatgc

SEQ ID NO: 17987 - DNA, 20 bp, Artificial Sequence
  Chr18_7 Reverse Primer
ttgtcccaggaattttgacc

SEQ ID NO: 17988 - DNA, 20 bp, Artificial Sequence
  Chr18_7 Reverse Primer
ttggagcagggaggaatatg

SEQ ID NO: 17989 - DNA, 20 bp, Artificial Sequence
  Chr18_7 Reverse Primer
ccttgcagctttaggtttgg

SEQ ID NO: 17990 - DNA, 20 bp, Artificial Sequence
  Chr18_7 Reverse Primer
gcctggagcacttcagaaag

SEQ ID NO: 17991 - DNA, 22 bp, Artificial Sequence
  Chr18_7 Reverse Primer
cctgtataacttttcccagtgc

SEQ ID NO: 17992 - DNA, 20 bp, Artificial Sequence
  Chr18_7 Reverse Primer
gtgtgctgaacatggcaaac

SEQ ID NO: 17993 - DNA, 20 bp, Artificial Sequence
  Chr18_7 Reverse Primer
tgaagatttggggaatccag

SEQ ID NO: 17994 - DNA, 25 bp, Artificial Sequence
  Chr18_7 Reverse Primer
tgactgctaaatgctagtctcttga

SEQ ID NO: 17995 - DNA, 20 bp, Artificial Sequence
  Chr18_7 Reverse Primer
aagagtggcagaggttggtg

SEQ ID NO: 17996 - DNA, 20 bp, Artificial Sequence
  Chr18_7 Reverse Primer
cagtggactgggttgcaaat

SEQ ID NO: 17997 - DNA, 20 bp, Artificial Sequence
  Chr18_7 Reverse Primer
taacggaggagcaaggtcag

SEQ ID NO: 17998 - DNA, 20 bp, Artificial Sequence
  Chr18_7 Reverse Primer
agcattcagtgttatgggca

SEQ ID NO: 17999 - DNA, 26 bp, Artificial Sequence
  Chr18_7 Reverse Primer
aagagacagagacagaaatgttttca

SEQ ID NO: 18000 - DNA, 24 bp, Artificial Sequence
  Chr18_7 Reverse Primer
ctttttacttgtgagacagctcaa

SEQ ID NO: 18001 - DNA, 20 bp, Artificial Sequence
  Chr18_7 Reverse Primer
catgtttccccaatttttgc

SEQ ID NO: 18002 - DNA, 25 bp, Artificial Sequence
  Chr18_7 Reverse Primer
tgaaccacttttgtttagacttgaa

SEQ ID NO: 18003 - DNA, 20 bp, Artificial Sequence
  Chr18_7 Reverse Primer
gccaaatgagccagttctct

SEQ ID NO: 18004 - DNA, 20 bp, Artificial Sequence
  Chr18_7 Reverse Primer
tcctttcccgttgtttgcta

SEQ ID NO: 18005 - DNA, 20 bp, Artificial Sequence
  Chr18_8 Forward Primer
gaatggcagctgactgttca

SEQ ID NO: 18006 - DNA, 22 bp, Artificial Sequence
  Chr18_8 Forward Primer
tctgaattgcttcattatcccc

SEQ ID NO: 18007 - DNA, 20 bp, Artificial Sequence
  Chr18_8 Forward Primer
gaaaaagcatcctgggaaca

SEQ ID NO: 18008 - DNA, 21 bp, Artificial Sequence
  Chr18_8 Forward Primer
ggcaattgtagtaggggtgaa

SEQ ID NO: 18009 - DNA, 20 bp, Artificial Sequence
  Chr18_8 Forward Primer
cagaggcagccagacctaag

SEQ ID NO: 18010 - DNA, 20 bp, Artificial Sequence
  Chr18_8 Forward Primer
ccccaagagatcgaagtgaa

SEQ ID NO: 18011 - DNA, 20 bp, Artificial Sequence
  Chr18_8 Forward Primer
cgttttatgatttggggcac

SEQ ID NO: 18012 - DNA, 20 bp, Artificial Sequence
  Chr18_8 Forward Primer
caaagatagactgggtgggc

SEQ ID NO: 18013 - DNA, 20 bp, Artificial Sequence
  Chr18_8 Forward Primer
gaccttaacaggaaggcgtg

SEQ ID NO: 18014 - DNA, 20 bp, Artificial Sequence
  Chr18_8 Forward Primer
tctcatgggggaagacagac

SEQ ID NO: 18015 - DNA, 20 bp, Artificial Sequence
  Chr18_8 Forward Primer
ccaaatctgcagagcattga

SEQ ID NO: 18016 - DNA, 20 bp, Artificial Sequence
  Chr18_8 Forward Primer
tgtgctgtttttgaaatggg

SEQ ID NO: 18017 - DNA, 20 bp, Artificial Sequence
  Chr18_8 Forward Primer
ctgccggtagcttctttgag

SEQ ID NO: 18018 - DNA, 20 bp, Artificial Sequence
  Chr18_8 Forward Primer
gatgtccagtgtgtggatgg

SEQ ID NO: 18019 - DNA, 21 bp, Artificial Sequence
  Chr18_8 Forward Primer
gctcaggtttgtcatcctcct

SEQ ID NO: 18020 - DNA, 20 bp, Artificial Sequence
  Chr18_8 Forward Primer
agagcagacccaaatccaga

SEQ ID NO: 18021 - DNA, 20 bp, Artificial Sequence
  Chr18_8 Forward Primer
cagcctcatcgtaaagggac

SEQ ID NO: 18022 - DNA, 20 bp, Artificial Sequence
  Chr18_8 Forward Primer
gcagaattccctggagtgag

SEQ ID NO: 18023 - DNA, 20 bp, Artificial Sequence
  Chr18_8 Forward Primer
aagcagttgcctcatggtct

SEQ ID NO: 18024 - DNA, 20 bp, Artificial Sequence
  Chr18_8 Forward Primer
tattggcttgctcgtgtgag

SEQ ID NO: 18025 - DNA, 20 bp, Artificial Sequence
  Chr18_8 Forward Primer
gtagtgtgtggctgcagtgg

SEQ ID NO: 18026 - DNA, 20 bp, Artificial Sequence
  Chr18_8 Forward Primer
aggtagtgcagatgcagcct

SEQ ID NO: 18027 - DNA, 20 bp, Artificial Sequence
  Chr18_8 Forward Primer
tgagttctgaatccctggct

SEQ ID NO: 18028 - DNA, 20 bp, Artificial Sequence
  Chr18_8 Forward Primer
tcatctgcctcgacttgttg

SEQ ID NO: 18029 - DNA, 20 bp, Artificial Sequence
  Chr18_8 Forward Primer
ggtggtcccgaaataagtga

SEQ ID NO: 18030 - DNA, 20 bp, Artificial Sequence
  Chr18_8 Forward Primer
ttctgctgtgttcctggatg

SEQ ID NO: 18031 - DNA, 20 bp, Artificial Sequence
  Chr18_8 Forward Primer
aaacaccaaaggccacaaag

SEQ ID NO: 18032 - DNA, 20 bp, Artificial Sequence
  Chr18_8 Forward Primer
cggcctcaagaatgtgtttt

SEQ ID NO: 18033 - DNA, 20 bp, Artificial Sequence
  Chr18_8 Forward Primer
tagcaagcctcatcgatcct

SEQ ID NO: 18034 - DNA, 20 bp, Artificial Sequence
  Chr18_8 Forward Primer
gcatagaacatggaccccag

SEQ ID NO: 18035 - DNA, 20 bp, Artificial Sequence
  Chr18_8 Forward Primer
atattttgctgcctgctgct

SEQ ID NO: 18036 - DNA, 20 bp, Artificial Sequence
  Chr18_8 Forward Primer
cgaacacacttgctggattt

SEQ ID NO: 18037 - DNA, 20 bp, Artificial Sequence
  Chr18_8 Forward Primer
tcaaaaacatgctggcagtc

SEQ ID NO: 18038 - DNA, 20 bp, Artificial Sequence
  Chr18_8 Forward Primer
accagtggtctctggcttgt

SEQ ID NO: 18039 - DNA, 20 bp, Artificial Sequence
  Chr18_8 Forward Primer
ctctcttctccacttccccc

SEQ ID NO: 18040 - DNA, 20 bp, Artificial Sequence
  Chr18_8 Forward Primer
ggcttggttgcaaaaagtgt

SEQ ID NO: 18041 - DNA, 20 bp, Artificial Sequence
  Chr18_8 Forward Primer
agagccctgcattacctctg

SEQ ID NO: 18042 - DNA, 20 bp, Artificial Sequence
  Chr18_8 Forward Primer
ttggaccctttgaacgtacc

SEQ ID NO: 18043 - DNA, 20 bp, Artificial Sequence
  Chr18_8 Forward Primer
tgggtccctaatggaagaga

SEQ ID NO: 18044 - DNA, 20 bp, Artificial Sequence
  Chr18_8 Forward Primer
gatcagcagtggcagaacaa

SEQ ID NO: 18045 - DNA, 20 bp, Artificial Sequence
  Chr18_8 Forward Primer
agctgcacacaaaacaaacg

SEQ ID NO: 18046 - DNA, 21 bp, Artificial Sequence
  Chr18_8 Forward Primer
cccctattgatggaaatttgg

SEQ ID NO: 18047 - DNA, 20 bp, Artificial Sequence
  Chr18_8 Forward Primer
gataattccaaattgccccc

SEQ ID NO: 18048 - DNA, 23 bp, Artificial Sequence
  Chr18_8 Forward Primer
tccctttagggtattgtctgtca

SEQ ID NO: 18049 - DNA, 20 bp, Artificial Sequence
  Chr18_8 Forward Primer
tggtgtctgtgctgcttttt

SEQ ID NO: 18050 - DNA, 23 bp, Artificial Sequence
  Chr18_8 Forward Primer
aacccaaggtaataaaatccctg

SEQ ID NO: 18051 - DNA, 20 bp, Artificial Sequence
  Chr18_8 Forward Primer
gatgttaaagggcagtggga

SEQ ID NO: 18052 - DNA, 20 bp, Artificial Sequence
  Chr18_8 Forward Primer
cgtaagctcaacggctctct

SEQ ID NO: 18053 - DNA, 20 bp, Artificial Sequence
  Chr18_8 Forward Primer
tgtgcccactggtatctgaa

SEQ ID NO: 18054 - DNA, 20 bp, Artificial Sequence
  Chr18_8 Forward Primer
gcgattagagatttgcaggc

SEQ ID NO: 18055 - DNA, 20 bp, Artificial Sequence
  Chr18_8 Forward Primer
agcaacaccatcacatggaa

SEQ ID NO: 18056 - DNA, 22 bp, Artificial Sequence
  Chr18_8 Forward Primer
tcttgagatctgccgtgtagaa

SEQ ID NO: 18057 - DNA, 20 bp, Artificial Sequence
  Chr18_8 Forward Primer
caattgacaatgtgccaaca

SEQ ID NO: 18058 - DNA, 23 bp, Artificial Sequence
  Chr18_8 Forward Primer
tcccaaaaccaactatatccaaa

SEQ ID NO: 18059 - DNA, 20 bp, Artificial Sequence
  Chr18_8 Forward Primer
cccagcatccatctactggt

SEQ ID NO: 18060 - DNA, 20 bp, Artificial Sequence
  Chr18_8 Forward Primer
ggaaaaggagaaaggtggga

SEQ ID NO: 18061 - DNA, 20 bp, Artificial Sequence
  Chr18_8 Forward Primer
tttgaagccaaggagttgct

SEQ ID NO: 18062 - DNA, 20 bp, Artificial Sequence
  Chr18_8 Forward Primer
cgggaatcctaagagcatga

SEQ ID NO: 18063 - DNA, 20 bp, Artificial Sequence
  Chr18_8 Forward Primer
ttcctaatggcaatgcttcc

SEQ ID NO: 18064 - DNA, 20 bp, Artificial Sequence
  Chr18_8 Forward Primer
tgtgcaaggtctctgtggtc

SEQ ID NO: 18065 - DNA, 20 bp, Artificial Sequence
  Chr18_8 Forward Primer
ggcccagaattcagcataaa

SEQ ID NO: 18066 - DNA, 27 bp, Artificial Sequence
  Chr18_8 Forward Primer
ggacttgagaattcagtaaaagacttg

SEQ ID NO: 18067 - DNA, 20 bp, Artificial Sequence
  Chr18_8 Forward Primer
cttgcacctctgcaatctca

SEQ ID NO: 18068 - DNA, 20 bp, Artificial Sequence
  Chr18_8 Forward Primer
agagctgtgccaggtgtgat

SEQ ID NO: 18069 - DNA, 20 bp, Artificial Sequence
  Chr18_8 Forward Primer
caagcccatttcaggaaaga

SEQ ID NO: 18070 - DNA, 20 bp, Artificial Sequence
  Chr18_8 Forward Primer
acaaagaagaagaccaccca

SEQ ID NO: 18071 - DNA, 20 bp, Artificial Sequence
  Chr18_8 Forward Primer
cagcacttgggagtttcaca

SEQ ID NO: 18072 - DNA, 26 bp, Artificial Sequence
  Chr18_8 Forward Primer
gcccatatcacattgtagtagatgtc

SEQ ID NO: 18073 - DNA, 20 bp, Artificial Sequence
  Chr18_8 Forward Primer
cttctgctcagatgtgctgc

SEQ ID NO: 18074 - DNA, 20 bp, Artificial Sequence
  Chr18_8 Forward Primer
cacagcctccatccagagat

SEQ ID NO: 18075 - DNA, 20 bp, Artificial Sequence
  Chr18_8 Forward Primer
gtttcatgccctgtattggc

SEQ ID NO: 18076 - DNA, 20 bp, Artificial Sequence
  Chr18_8 Forward Primer
agacgaggctgcatgaaaat

SEQ ID NO: 18077 - DNA, 18 bp, Artificial Sequence
  Chr18_8 Forward Primer
gtgtgctccctgaggtgg

SEQ ID NO: 18078 - DNA, 20 bp, Artificial Sequence
  Chr18_8 Forward Primer
agcagtggggatcaagacag

SEQ ID NO: 18079 - DNA, 20 bp, Artificial Sequence
  Chr18_8 Forward Primer
gcacattggctactggttca

SEQ ID NO: 18080 - DNA, 20 bp, Artificial Sequence
  Chr18_8 Forward Primer
tgtcttggccagaactgaga

SEQ ID NO: 18081 - DNA, 20 bp, Artificial Sequence
  Chr18_8 Forward Primer
tatagggaatcggggaggag

SEQ ID NO: 18082 - DNA, 20 bp, Artificial Sequence
  Chr18_8 Forward Primer
atctgggattctttttgggc

SEQ ID NO: 18083 - DNA, 20 bp, Artificial Sequence
  Chr18_8 Forward Primer
tgtttgtaaatggtgcccaa

SEQ ID NO: 18084 - DNA, 20 bp, Artificial Sequence
  Chr18_8 Forward Primer
gaggaggcttgagacctgtg

SEQ ID NO: 18085 - DNA, 20 bp, Artificial Sequence
  Chr18_8 Forward Primer
aggagggacgaagttgctct

SEQ ID NO: 18086 - DNA, 20 bp, Artificial Sequence
  Chr18_8 Forward Primer
aacagagcaaaggcggttta

SEQ ID NO: 18087 - DNA, 20 bp, Artificial Sequence
  Chr18_8 Forward Primer
gaatcaactggggctgaaga

SEQ ID NO: 18088 - DNA, 20 bp, Artificial Sequence
  Chr18_8 Forward Primer
tttcctcccttccctcattt

SEQ ID NO: 18089 - DNA, 21 bp, Artificial Sequence
  Chr18_8 Forward Primer
caatgccacttggtgattttt

SEQ ID NO: 18090 - DNA, 20 bp, Artificial Sequence
  Chr18_8 Forward Primer
ttatgggattgtgagagccc

SEQ ID NO: 18091 - DNA, 20 bp, Artificial Sequence
  Chr18_8 Forward Primer
aggaacagccatcatcatcc

SEQ ID NO: 18092 - DNA, 20 bp, Artificial Sequence
  Chr18_8 Forward Primer
tcagtccccctcagattgtc

SEQ ID NO: 18093 - DNA, 20 bp, Artificial Sequence
  Chr18_8 Forward Primer
actcccctggagctgttctt

SEQ ID NO: 18094 - DNA, 20 bp, Artificial Sequence
  Chr18_8 Forward Primer
gctaatctggaccctcatgc

SEQ ID NO: 18095 - DNA, 20 bp, Artificial Sequence
  Chr18_8 Forward Primer
aatgttgccccttttgtgtc

SEQ ID NO: 18096 - DNA, 20 bp, Artificial Sequence
  Chr18_8 Forward Primer
tggtaagccctgacaaatga

SEQ ID NO: 18097 - DNA, 20 bp, Artificial Sequence
  Chr18_8 Forward Primer
taagaccttgaactggggca

SEQ ID NO: 18098 - DNA, 20 bp, Artificial Sequence
  Chr18_8 Forward Primer
ttggaaaaggccacattagg

SEQ ID NO: 18099 - DNA, 20 bp, Artificial Sequence
  Chr18_8 Forward Primer
ttcctgtgccttcctttcag

SEQ ID NO: 18100 - DNA, 21 bp, Artificial Sequence
  Chr18_8 Forward Primer
cacttggaaaagtatctcggg

SEQ ID NO: 18101 - DNA, 24 bp, Artificial Sequence
  Chr18_8 Reverse Primer
cttccttgtaatgcaaatctgttg

SEQ ID NO: 18102 - DNA, 20 bp, Artificial Sequence
  Chr18_8 Reverse Primer
ggctgcatgaggtaccattt

SEQ ID NO: 18103 - DNA, 26 bp, Artificial Sequence
  Chr18_8 Reverse Primer
ccataccatttcttctttttatttca

SEQ ID NO: 18104 - DNA, 20 bp, Artificial Sequence
  Chr18_8 Reverse Primer
gcgtgaaccaaaacttgaca

SEQ ID NO: 18105 - DNA, 20 bp, Artificial Sequence
  Chr18_8 Reverse Primer
attctcctcctccacccact

SEQ ID NO: 18106 - DNA, 20 bp, Artificial Sequence
  Chr18_8 Reverse Primer
tttctgctcacaccactgct

SEQ ID NO: 18107 - DNA, 23 bp, Artificial Sequence
  Chr18_8 Reverse Primer
cctgtacttctccaaatctgacc

SEQ ID NO: 18108 - DNA, 20 bp, Artificial Sequence
  Chr18_8 Reverse Primer
gaaaagccacaaaacttggc

SEQ ID NO: 18109 - DNA, 20 bp, Artificial Sequence
  Chr18_8 Reverse Primer
tgggtgagtaaaaagggtgg

SEQ ID NO: 18110 - DNA, 20 bp, Artificial Sequence
  Chr18_8 Reverse Primer
ttccttcatccacacacagc

SEQ ID NO: 18111 - DNA, 20 bp, Artificial Sequence
  Chr18_8 Reverse Primer
cccctctgagtgttcttgga

SEQ ID NO: 18112 - DNA, 20 bp, Artificial Sequence
  Chr18_8 Reverse Primer
gggtatgtctgctcccaaac

SEQ ID NO: 18113 - DNA, 20 bp, Artificial Sequence
  Chr18_8 Reverse Primer
acgtggaggcttcagagtgt

SEQ ID NO: 18114 - DNA, 20 bp, Artificial Sequence
  Chr18_8 Reverse Primer
acctaatgattgcaagccca

SEQ ID NO: 18115 - DNA, 20 bp, Artificial Sequence
  Chr18_8 Reverse Primer
tcatcgggtgctctcttaca

SEQ ID NO: 18116 - DNA, 20 bp, Artificial Sequence
  Chr18_8 Reverse Primer
gggactctctccacctcctc

SEQ ID NO: 18117 - DNA, 20 bp, Artificial Sequence
  Chr18_8 Reverse Primer
tcaatgggaaggaccacatt

SEQ ID NO: 18118 - DNA, 20 bp, Artificial Sequence
  Chr18_8 Reverse Primer
atttggtacaggcatctcgc

SEQ ID NO: 18119 - DNA, 20 bp, Artificial Sequence
  Chr18_8 Reverse Primer
aggagcagagcagaattccc

SEQ ID NO: 18120 - DNA, 20 bp, Artificial Sequence
  Chr18_8 Reverse Primer
agggtccttatccagttggg

SEQ ID NO: 18121 - DNA, 20 bp, Artificial Sequence
  Chr18_8 Reverse Primer
gcatcatcagaccacaagga

SEQ ID NO: 18122 - DNA, 20 bp, Artificial Sequence
  Chr18_8 Reverse Primer
ttctcttcacacatgcaggg

SEQ ID NO: 18123 - DNA, 20 bp, Artificial Sequence
  Chr18_8 Reverse Primer
ccagctggaaatgaaaagga

SEQ ID NO: 18124 - DNA, 20 bp, Artificial Sequence
  Chr18_8 Reverse Primer
gagaagctgatggtttgggt

SEQ ID NO: 18125 - DNA, 20 bp, Artificial Sequence
  Chr18_8 Reverse Primer
tgttcttgaggggcactctt

SEQ ID NO: 18126 - DNA, 21 bp, Artificial Sequence
  Chr18_8 Reverse Primer
aaacagtacttgctccggtga

SEQ ID NO: 18127 - DNA, 20 bp, Artificial Sequence
  Chr18_8 Reverse Primer
ccaatggtctcatggcttct

SEQ ID NO: 18128 - DNA, 20 bp, Artificial Sequence
  Chr18_8 Reverse Primer
aatgtcagtgaggcaaagcc

SEQ ID NO: 18129 - DNA, 20 bp, Artificial Sequence
  Chr18_8 Reverse Primer
ttgtattgctgcatgccttc

SEQ ID NO: 18130 - DNA, 20 bp, Artificial Sequence
  Chr18_8 Reverse Primer
caaagttgcccacactcaac

SEQ ID NO: 18131 - DNA, 20 bp, Artificial Sequence
  Chr18_8 Reverse Primer
ggccaagacatttggtcaat

SEQ ID NO: 18132 - DNA, 20 bp, Artificial Sequence
  Chr18_8 Reverse Primer
ccaagaagaggagacgatgc

SEQ ID NO: 18133 - DNA, 20 bp, Artificial Sequence
  Chr18_8 Reverse Primer
aaagcttggcagctgaacat

SEQ ID NO: 18134 - DNA, 20 bp, Artificial Sequence
  Chr18_8 Reverse Primer
agaccacgaatggccttatg

SEQ ID NO: 18135 - DNA, 20 bp, Artificial Sequence
  Chr18_8 Reverse Primer
caatgcagatcacgtgttga

SEQ ID NO: 18136 - DNA, 20 bp, Artificial Sequence
  Chr18_8 Reverse Primer
ccctcttccttcctcctctg

SEQ ID NO: 18137 - DNA, 20 bp, Artificial Sequence
  Chr18_8 Reverse Primer
cactctcccggatcctctta

SEQ ID NO: 18138 - DNA, 20 bp, Artificial Sequence
  Chr18_8 Reverse Primer
atcttgtcaggattgggtgc

SEQ ID NO: 18139 - DNA, 20 bp, Artificial Sequence
  Chr18_8 Reverse Primer
gctctgggcagctgttaagt

SEQ ID NO: 18140 - DNA, 20 bp, Artificial Sequence
  Chr18_8 Reverse Primer
tcagaatgctcatcttcccc

SEQ ID NO: 18141 - DNA, 24 bp, Artificial Sequence
  Chr18_8 Reverse Primer
tgaaaagatgtctttgctacctca

SEQ ID NO: 18142 - DNA, 20 bp, Artificial Sequence
  Chr18_8 Reverse Primer
tgccatttcacttttacgga

SEQ ID NO: 18143 - DNA, 20 bp, Artificial Sequence
  Chr18_8 Reverse Primer
tgaaaagatgctcaaccacg

SEQ ID NO: 18144 - DNA, 21 bp, Artificial Sequence
  Chr18_8 Reverse Primer
tggaggaacatttctgtagcc

SEQ ID NO: 18145 - DNA, 20 bp, Artificial Sequence
  Chr18_8 Reverse Primer
tgaatgtgcgaaaatccaaa

SEQ ID NO: 18146 - DNA, 19 bp, Artificial Sequence
  Chr18_8 Reverse Primer
aggtgctcccttgcttgag

SEQ ID NO: 18147 - DNA, 20 bp, Artificial Sequence
  Chr18_8 Reverse Primer
gaaagttgttcccagccaag

SEQ ID NO: 18148 - DNA, 20 bp, Artificial Sequence
  Chr18_8 Reverse Primer
ccagaatttcagggcgataa

SEQ ID NO: 18149 - DNA, 20 bp, Artificial Sequence
  Chr18_8 Reverse Primer
tgtacaattggctggaaacg

SEQ ID NO: 18150 - DNA, 20 bp, Artificial Sequence
  Chr18_8 Reverse Primer
taggagagtgcacatgctgg

SEQ ID NO: 18151 - DNA, 24 bp, Artificial Sequence
  Chr18_8 Reverse Primer
ggttttacttctgaaacacgacct

SEQ ID NO: 18152 - DNA, 21 bp, Artificial Sequence
  Chr18_8 Reverse Primer
tgctcaaatcacactggaaca

SEQ ID NO: 18153 - DNA, 20 bp, Artificial Sequence
  Chr18_8 Reverse Primer
aatggccaccaccttgacta

SEQ ID NO: 18154 - DNA, 20 bp, Artificial Sequence
  Chr18_8 Reverse Primer
ccccctcataacacgaaaga

SEQ ID NO: 18155 - DNA, 20 bp, Artificial Sequence
  Chr18_8 Reverse Primer
cccaagtagctccagctttg

SEQ ID NO: 18156 - DNA, 21 bp, Artificial Sequence
  Chr18_8 Reverse Primer
tgtctccaaatgatgcacaga

SEQ ID NO: 18157 - DNA, 20 bp, Artificial Sequence
  Chr18_8 Reverse Primer
agtggtggcatttgtggaat

SEQ ID NO: 18158 - DNA, 20 bp, Artificial Sequence
  Chr18_8 Reverse Primer
ctcatgggacctaaagctgg

SEQ ID NO: 18159 - DNA, 20 bp, Artificial Sequence
  Chr18_8 Reverse Primer
agacccatatctcacggtgg

SEQ ID NO: 18160 - DNA, 20 bp, Artificial Sequence
  Chr18_8 Reverse Primer
ggagctgagctgaacaaagg

SEQ ID NO: 18161 - DNA, 20 bp, Artificial Sequence
  Chr18_8 Reverse Primer
tgttcagttgatgcaaagcc

SEQ ID NO: 18162 - DNA, 20 bp, Artificial Sequence
  Chr18_8 Reverse Primer
aaccttgaaccctcaccaga

SEQ ID NO: 18163 - DNA, 20 bp, Artificial Sequence
  Chr18_8 Reverse Primer
ccttcctcttcaggtccctt

SEQ ID NO: 18164 - DNA, 22 bp, Artificial Sequence
  Chr18_8 Reverse Primer
ttggctccatattttctgattg

SEQ ID NO: 18165 - DNA, 20 bp, Artificial Sequence
  Chr18_8 Reverse Primer
tccattccaaaaacgtgtca

SEQ ID NO: 18166 - DNA, 20 bp, Artificial Sequence
  Chr18_8 Reverse Primer
tgacgtggacacccgtaata

SEQ ID NO: 18167 - DNA, 20 bp, Artificial Sequence
  Chr18_8 Reverse Primer
ggacatgcacttcatccctt

SEQ ID NO: 18168 - DNA, 20 bp, Artificial Sequence
  Chr18_8 Reverse Primer
gctttggttcttccccttgt

SEQ ID NO: 18169 - DNA, 20 bp, Artificial Sequence
  Chr18_8 Reverse Primer
tccactggagttgtgtcagc

SEQ ID NO: 18170 - DNA, 20 bp, Artificial Sequence
  Chr18_8 Reverse Primer
cttcctgctattgtccaggc

SEQ ID NO: 18171 - DNA, 24 bp, Artificial Sequence
  Chr18_8 Reverse Primer
aagccagttgataactgattcaca

SEQ ID NO: 18172 - DNA, 20 bp, Artificial Sequence
  Chr18_8 Reverse Primer
agagactgtccctgtcccct

SEQ ID NO: 18173 - DNA, 20 bp, Artificial Sequence
  Chr18_8 Reverse Primer
aatactaggccggtgtgtgc

SEQ ID NO: 18174 - DNA, 20 bp, Artificial Sequence
  Chr18_8 Reverse Primer
gaggtgatggggtgatcaat

SEQ ID NO: 18175 - DNA, 21 bp, Artificial Sequence
  Chr18_8 Reverse Primer
tctcccctacagagagagcct

SEQ ID NO: 18176 - DNA, 20 bp, Artificial Sequence
  Chr18_8 Reverse Primer
tttgctgcagaagaaagcac

SEQ ID NO: 18177 - DNA, 20 bp, Artificial Sequence
  Chr18_8 Reverse Primer
atgtgggaagattccatcca

SEQ ID NO: 18178 - DNA, 20 bp, Artificial Sequence
  Chr18_8 Reverse Primer
cagctttcctcctgctgttc

SEQ ID NO: 18179 - DNA, 20 bp, Artificial Sequence
  Chr18_8 Reverse Primer
gcatactgtcctgggcattt

SEQ ID NO: 18180 - DNA, 20 bp, Artificial Sequence
  Chr18_8 Reverse Primer
ttaaggcctgtgggaaattg

SEQ ID NO: 18181 - DNA, 21 bp, Artificial Sequence
  Chr18_8 Reverse Primer
aactgggcataaactctgagc

SEQ ID NO: 18182 - DNA, 20 bp, Artificial Sequence
  Chr18_8 Reverse Primer
acagctaagaagccgcaatc

SEQ ID NO: 18183 - DNA, 20 bp, Artificial Sequence
  Chr18_8 Reverse Primer
tagcaggcctacggttcatt

SEQ ID NO: 18184 - DNA, 20 bp, Artificial Sequence
  Chr18_8 Reverse Primer
ttatgagccgcactgctatg

SEQ ID NO: 18185 - DNA, 20 bp, Artificial Sequence
  Chr18_8 Reverse Primer
ataccgaagacccatggagg

SEQ ID NO: 18186 - DNA, 20 bp, Artificial Sequence
  Chr18_8 Reverse Primer
cattccagatgcggtgtatg

SEQ ID NO: 18187 - DNA, 20 bp, Artificial Sequence
  Chr18_8 Reverse Primer
gggacacacttcacaagcaa

SEQ ID NO: 18188 - DNA, 20 bp, Artificial Sequence
  Chr18_8 Reverse Primer
tagtgcatggcttctcaacg

SEQ ID NO: 18189 - DNA, 20 bp, Artificial Sequence
  Chr18_8 Reverse Primer
ttcacaggagcagggaaatc

SEQ ID NO: 18190 - DNA, 20 bp, Artificial Sequence
  Chr18_8 Reverse Primer
attaggacggggaatatggg

SEQ ID NO: 18191 - DNA, 20 bp, Artificial Sequence
  Chr18_8 Reverse Primer
atcactcctgggcagctaga

SEQ ID NO: 18192 - DNA, 25 bp, Artificial Sequence
  Chr18_8 Reverse Primer
aaaaattacgaccaaagaagaatca

SEQ ID NO: 18193 - DNA, 22 bp, Artificial Sequence
  Chr18_8 Reverse Primer
tcagacatattccattctggga

SEQ ID NO: 18194 - DNA, 21 bp, Artificial Sequence
  Chr18_8 Reverse Primer
tgaaactgggaagattttgct

SEQ ID NO: 18195 - DNA, 20 bp, Artificial Sequence
  Chr18_8 Reverse Primer
aacatgattcccgtgtcctc

SEQ ID NO: 18196 - DNA, 20 bp, Artificial Sequence
  Chr18_8 Reverse Primer
ggctatgcaaacttgggtgt

SEQ ID NO: 18197 - DNA, 20 bp, Artificial Sequence
  Chr19q_1 Forward Primer
tgctttccgaacttcacctt

SEQ ID NO: 18198 - DNA, 20 bp, Artificial Sequence
  Chr19q_1 Forward Primer
caccaggcagtgattgaatg

SEQ ID NO: 18199 - DNA, 18 bp, Artificial Sequence
  Chr19q_1 Forward Primer
cagccctggccttagctc

SEQ ID NO: 18200 - DNA, 20 bp, Artificial Sequence
  Chr19q_1 Forward Primer
aaagttccagctcaggcaaa

SEQ ID NO: 18201 - DNA, 20 bp, Artificial Sequence
  Chr19q_1 Forward Primer
aacagagctgggaaaactgg

SEQ ID NO: 18202 - DNA, 20 bp, Artificial Sequence
  Chr19q_1 Forward Primer
ggtttccacctcatccttca

SEQ ID NO: 18203 - DNA, 20 bp, Artificial Sequence
  Chr19q_1 Forward Primer
tgacatgtgcctctctggtc

SEQ ID NO: 18204 - DNA, 20 bp, Artificial Sequence
  Chr19q_1 Forward Primer
gagcaggcagtcctgagtgt

SEQ ID NO: 18205 - DNA, 20 bp, Artificial Sequence
  Chr19q_1 Forward Primer
cacatctgggtggacagagg

SEQ ID NO: 18206 - DNA, 20 bp, Artificial Sequence
  Chr19q_1 Forward Primer
ctcccagcttcctgtttctg

SEQ ID NO: 18207 - DNA, 20 bp, Artificial Sequence
  Chr19q_1 Forward Primer
catggtgcagacacttacgg

SEQ ID NO: 18208 - DNA, 20 bp, Artificial Sequence
  Chr19q_1 Forward Primer
accatccttttcctcccact

SEQ ID NO: 18209 - DNA, 20 bp, Artificial Sequence
  Chr19q_1 Forward Primer
gatcccctggagttgtgatg

SEQ ID NO: 18210 - DNA, 20 bp, Artificial Sequence
  Chr19q_1 Forward Primer
cacggacaggtgagtaccct

SEQ ID NO: 18211 - DNA, 20 bp, Artificial Sequence
  Chr19q_1 Forward Primer
ccgactgtttaccccaacat

SEQ ID NO: 18212 - DNA, 20 bp, Artificial Sequence
  Chr19q_1 Forward Primer
cctgccagatgccaatatct

SEQ ID NO: 18213 - DNA, 20 bp, Artificial Sequence
  Chr19q_1 Forward Primer
gggcttctttagacccgact

SEQ ID NO: 18214 - DNA, 20 bp, Artificial Sequence
  Chr19q_1 Forward Primer
attccaggcagtggaatgtc

SEQ ID NO: 18215 - DNA, 20 bp, Artificial Sequence
  Chr19q_1 Forward Primer
gcatttgggttcttcagcat

SEQ ID NO: 18216 - DNA, 20 bp, Artificial Sequence
  Chr19q_1 Forward Primer
cgatgaggaaaaagaccagc

SEQ ID NO: 18217 - DNA, 20 bp, Artificial Sequence
  Chr19q_1 Forward Primer
gctgccgtgtggataagagt

SEQ ID NO: 18218 - DNA, 20 bp, Artificial Sequence
  Chr19q_1 Forward Primer
cccctttgtatggtgagacc

SEQ ID NO: 18219 - DNA, 20 bp, Artificial Sequence
  Chr19q_1 Forward Primer
ctgtgtgtgtgcacgtgtgt

SEQ ID NO: 18220 - DNA, 20 bp, Artificial Sequence
  Chr19q_1 Forward Primer
gagaccttgtgccttccttg

SEQ ID NO: 18221 - DNA, 20 bp, Artificial Sequence
  Chr19q_1 Forward Primer
cccccaaagccttaacaaat

SEQ ID NO: 18222 - DNA, 19 bp, Artificial Sequence
  Chr19q_1 Forward Primer
agagacgctgagtgagccc

SEQ ID NO: 18223 - DNA, 20 bp, Artificial Sequence
  Chr19q_1 Forward Primer
ctaaaagctgctaatgcggg

SEQ ID NO: 18224 - DNA, 20 bp, Artificial Sequence
  Chr19q_1 Forward Primer
ctgggactcttctcctgcac

SEQ ID NO: 18225 - DNA, 20 bp, Artificial Sequence
  Chr19q_1 Forward Primer
agtaaacaggcctgctggag

SEQ ID NO: 18226 - DNA, 20 bp, Artificial Sequence
  Chr19q_1 Forward Primer
gaagagtcactggggtggac

SEQ ID NO: 18227 - DNA, 20 bp, Artificial Sequence
  Chr19q_1 Forward Primer
atggttatcttgctgggcac

SEQ ID NO: 18228 - DNA, 20 bp, Artificial Sequence
  Chr19q_1 Forward Primer
ccaagctctctccctgtcac

SEQ ID NO: 18229 - DNA, 20 bp, Artificial Sequence
  Chr19q_1 Forward Primer
gactgcctcttctgctccac

SEQ ID NO: 18230 - DNA, 20 bp, Artificial Sequence
  Chr19q_1 Forward Primer
aacaatggcgacagaggaac

SEQ ID NO: 18231 - DNA, 20 bp, Artificial Sequence
  Chr19q_1 Forward Primer
gccttcctctttctgctgtc

SEQ ID NO: 18232 - DNA, 20 bp, Artificial Sequence
  Chr19q_1 Forward Primer
gccaggtcaactctgtcctc

SEQ ID NO: 18233 - DNA, 20 bp, Artificial Sequence
  Chr19q_1 Forward Primer
cttccagcttcccacttctg

SEQ ID NO: 18234 - DNA, 20 bp, Artificial Sequence
  Chr19q_1 Forward Primer
caaatgagacaatgtgggca

SEQ ID NO: 18235 - DNA, 20 bp, Artificial Sequence
  Chr19q_1 Forward Primer
acctgctggaaaaccaagag

SEQ ID NO: 18236 - DNA, 20 bp, Artificial Sequence
  Chr19q_1 Forward Primer
atccagggtcactgatcacc

SEQ ID NO: 18237 - DNA, 20 bp, Artificial Sequence
  Chr19q_1 Forward Primer
accagggatggaacctgttt

SEQ ID NO: 18238 - DNA, 19 bp, Artificial Sequence
  Chr19q_1 Forward Primer
agccttgaaggtgccaagt

SEQ ID NO: 18239 - DNA, 20 bp, Artificial Sequence
  Chr19q_1 Forward Primer
ctgttggggaaattcaagga

SEQ ID NO: 18240 - DNA, 20 bp, Artificial Sequence
  Chr19q_1 Forward Primer
atcaggttcaccaaagcctg

SEQ ID NO: 18241 - DNA, 20 bp, Artificial Sequence
  Chr19q_1 Forward Primer
ctgacctcacatcccgttct

SEQ ID NO: 18242 - DNA, 20 bp, Artificial Sequence
  Chr19q_1 Forward Primer
atgcatatcccctgaaccct

SEQ ID NO: 18243 - DNA, 20 bp, Artificial Sequence
  Chr19q_1 Forward Primer
ccactgttttgcctgtctca

SEQ ID NO: 18244 - DNA, 20 bp, Artificial Sequence
  Chr19q_1 Forward Primer
cataatttgggctgctggat

SEQ ID NO: 18245 - DNA, 20 bp, Artificial Sequence
  Chr19q_1 Forward Primer
ggctcaccaactacaggagc

SEQ ID NO: 18246 - DNA, 20 bp, Artificial Sequence
  Chr19q_1 Forward Primer
ttggtgaatgaggaaaaggc

SEQ ID NO: 18247 - DNA, 20 bp, Artificial Sequence
  Chr19q_1 Forward Primer
ggctcagtcttttctggcac

SEQ ID NO: 18248 - DNA, 20 bp, Artificial Sequence
  Chr19q_1 Forward Primer
aatgaggatgggatgctgag

SEQ ID NO: 18249 - DNA, 20 bp, Artificial Sequence
  Chr19q_1 Forward Primer
ctaaatctgaacccctgcgt

SEQ ID NO: 18250 - DNA, 27 bp, Artificial Sequence
  Chr19q_1 Forward Primer
cccagctacttataaataccacttcag

SEQ ID NO: 18251 - DNA, 20 bp, Artificial Sequence
  Chr19q_1 Forward Primer
taaaaggaaggaaggggacc

SEQ ID NO: 18252 - DNA, 20 bp, Artificial Sequence
  Chr19q_1 Forward Primer
tcgggataaaggtgaaccag

SEQ ID NO: 18253 - DNA, 20 bp, Artificial Sequence
  Chr19q_1 Forward Primer
tcaaaacaatgaccagcaca

SEQ ID NO: 18254 - DNA, 20 bp, Artificial Sequence
  Chr19q_1 Forward Primer
gccttggtgacaatcaatcc

SEQ ID NO: 18255 - DNA, 20 bp, Artificial Sequence
  Chr19q_1 Forward Primer
tgctgaccagcactaggaga

SEQ ID NO: 18256 - DNA, 20 bp, Artificial Sequence
  Chr19q_1 Forward Primer
ctctacctcccagccttgtg

SEQ ID NO: 18257 - DNA, 20 bp, Artificial Sequence
  Chr19q_1 Forward Primer
aaacagagaggctgccaaac

SEQ ID NO: 18258 - DNA, 20 bp, Artificial Sequence
  Chr19q_1 Forward Primer
tcagcccctaatgagcaaag

SEQ ID NO: 18259 - DNA, 20 bp, Artificial Sequence
  Chr19q_1 Forward Primer
atctcctaggatgcctggct

SEQ ID NO: 18260 - DNA, 20 bp, Artificial Sequence
  Chr19q_1 Forward Primer
tccttgaacaaaggagcaca

SEQ ID NO: 18261 - DNA, 20 bp, Artificial Sequence
  Chr19q_1 Forward Primer
atccaacagcttcctgtgct

SEQ ID NO: 18262 - DNA, 20 bp, Artificial Sequence
  Chr19q_1 Forward Primer
caaatggaaaccagctgtga

SEQ ID NO: 18263 - DNA, 20 bp, Artificial Sequence
  Chr19q_1 Forward Primer
atgaaaggcatcctttgtgg

SEQ ID NO: 18264 - DNA, 20 bp, Artificial Sequence
  Chr19q_1 Forward Primer
aggatttggtttgatgccag

SEQ ID NO: 18265 - DNA, 20 bp, Artificial Sequence
  Chr19q_1 Forward Primer
agctgccaggtagggcttat

SEQ ID NO: 18266 - DNA, 20 bp, Artificial Sequence
  Chr19q_1 Forward Primer
ctgagaccattgcccaacat

SEQ ID NO: 18267 - DNA, 20 bp, Artificial Sequence
  Chr19q_1 Forward Primer
accctcaggctgtagtccct

SEQ ID NO: 18268 - DNA, 20 bp, Artificial Sequence
  Chr19q_1 Forward Primer
ttactgtgctcttgcgttgc

SEQ ID NO: 18269 - DNA, 20 bp, Artificial Sequence
  Chr19q_1 Forward Primer
atgaggggacagtgaggatg

SEQ ID NO: 18270 - DNA, 20 bp, Artificial Sequence
  Chr19q_1 Forward Primer
tattgtcaagcacaggcagc

SEQ ID NO: 18271 - DNA, 20 bp, Artificial Sequence
  Chr19q_1 Forward Primer
ctgcagctggacctagcata

SEQ ID NO: 18272 - DNA, 20 bp, Artificial Sequence
  Chr19q_1 Forward Primer
tggctaaacaaagtcagggg

SEQ ID NO: 18273 - DNA, 20 bp, Artificial Sequence
  Chr19q_1 Forward Primer
tttccttgaaggccagctaa

SEQ ID NO: 18274 - DNA, 20 bp, Artificial Sequence
  Chr19q_1 Forward Primer
tctgagatccccttcattgc

SEQ ID NO: 18275 - DNA, 20 bp, Artificial Sequence
  Chr19q_1 Forward Primer
ttcctcccctctactttggc

SEQ ID NO: 18276 - DNA, 19 bp, Artificial Sequence
  Chr19q_1 Forward Primer
cttagcaagctgcgacctg

SEQ ID NO: 18277 - DNA, 20 bp, Artificial Sequence
  Chr19q_1 Forward Primer
ctgaaaagcaccatcagcct

SEQ ID NO: 18278 - DNA, 20 bp, Artificial Sequence
  Chr19q_1 Forward Primer
ggggtctctctcttcaggct

SEQ ID NO: 18279 - DNA, 20 bp, Artificial Sequence
  Chr19q_1 Forward Primer
cagaggactccctctcctcc

SEQ ID NO: 18280 - DNA, 20 bp, Artificial Sequence
  Chr19q_1 Forward Primer
aagagaaccaagccgtcctt

SEQ ID NO: 18281 - DNA, 20 bp, Artificial Sequence
  Chr19q_1 Forward Primer
atccgagcaaaaccaaaaca

SEQ ID NO: 18282 - DNA, 20 bp, Artificial Sequence
  Chr19q_1 Forward Primer
agctttctggtgtgactcgg

SEQ ID NO: 18283 - DNA, 20 bp, Artificial Sequence
  Chr19q_1 Forward Primer
gagcggtgagtttgcatttc

SEQ ID NO: 18284 - DNA, 18 bp, Artificial Sequence
  Chr19q_1 Forward Primer
gaccccaaaccactccct

SEQ ID NO: 18285 - DNA, 19 bp, Artificial Sequence
  Chr19q_1 Forward Primer
gcttggcttcatcctcctc

SEQ ID NO: 18286 - DNA, 20 bp, Artificial Sequence
  Chr19q_1 Forward Primer
atgtaggcgctgatgtcgat

SEQ ID NO: 18287 - DNA, 20 bp, Artificial Sequence
  Chr19q_1 Forward Primer
gctctgatctccaggctacc

SEQ ID NO: 18288 - DNA, 20 bp, Artificial Sequence
  Chr19q_1 Forward Primer
accgagggaggagacaaact

SEQ ID NO: 18289 - DNA, 20 bp, Artificial Sequence
  Chr19q_1 Forward Primer
gagccctcaagtgtctcctg

SEQ ID NO: 18290 - DNA, 20 bp, Artificial Sequence
  Chr19q_1 Forward Primer
tagcccaactgcttcgtttt

SEQ ID NO: 18291 - DNA, 20 bp, Artificial Sequence
  Chr19q_1 Forward Primer
gcggtgctaaaactaatggc

SEQ ID NO: 18292 - DNA, 20 bp, Artificial Sequence
  Chr19q_1 Forward Primer
tgaaccagaattcacccacc

SEQ ID NO: 18293 - DNA, 20 bp, Artificial Sequence
  Chr19q_1 Reverse Primer
gagttgtcatggggaggaga

SEQ ID NO: 18294 - DNA, 20 bp, Artificial Sequence
  Chr19q_1 Reverse Primer
agacagaagacagtgggcgt

SEQ ID NO: 18295 - DNA, 20 bp, Artificial Sequence
  Chr19q_1 Reverse Primer
aggagcttcacaccatgctc

SEQ ID NO: 18296 - DNA, 20 bp, Artificial Sequence
  Chr19q_1 Reverse Primer
ctgaaacccttcctctccct

SEQ ID NO: 18297 - DNA, 20 bp, Artificial Sequence
  Chr19q_1 Reverse Primer
tccaggctgttccctaaaga

SEQ ID NO: 18298 - DNA, 20 bp, Artificial Sequence
  Chr19q_1 Reverse Primer
ggagccctagagcaggtctt

SEQ ID NO: 18299 - DNA, 20 bp, Artificial Sequence
  Chr19q_1 Reverse Primer
ctagaaccacgcaccaacct

SEQ ID NO: 18300 - DNA, 20 bp, Artificial Sequence
  Chr19q_1 Reverse Primer
ctggcctgactccttgactc

SEQ ID NO: 18301 - DNA, 20 bp, Artificial Sequence
  Chr19q_1 Reverse Primer
agccatgtctgggtgtctct

SEQ ID NO: 18302 - DNA, 20 bp, Artificial Sequence
  Chr19q_1 Reverse Primer
gagctgtgggagtctcttgg

SEQ ID NO: 18303 - DNA, 20 bp, Artificial Sequence
  Chr19q_1 Reverse Primer
cacacacacacacaccctca

SEQ ID NO: 18304 - DNA, 18 bp, Artificial Sequence
  Chr19q_1 Reverse Primer
gtgtgcccacctcctacg

SEQ ID NO: 18305 - DNA, 20 bp, Artificial Sequence
  Chr19q_1 Reverse Primer
ctgtcctgaccttgacccag

SEQ ID NO: 18306 - DNA, 20 bp, Artificial Sequence
  Chr19q_1 Reverse Primer
tcctctctgtgctaatgggg

SEQ ID NO: 18307 - DNA, 20 bp, Artificial Sequence
  Chr19q_1 Reverse Primer
gagtccagagatgaggcagg

SEQ ID NO: 18308 - DNA, 20 bp, Artificial Sequence
  Chr19q_1 Reverse Primer
gccttgcaagtggagagaac

SEQ ID NO: 18309 - DNA, 21 bp, Artificial Sequence
  Chr19q_1 Reverse Primer
ggctgtacacatctcctctgc

SEQ ID NO: 18310 - DNA, 20 bp, Artificial Sequence
  Chr19q_1 Reverse Primer
ccacataggcaggtccagtt

SEQ ID NO: 18311 - DNA, 20 bp, Artificial Sequence
  Chr19q_1 Reverse Primer
agatgcatagtattgcgggc

SEQ ID NO: 18312 - DNA, 20 bp, Artificial Sequence
  Chr19q_1 Reverse Primer
aaagcctttccagcctcttc

SEQ ID NO: 18313 - DNA, 20 bp, Artificial Sequence
  Chr19q_1 Reverse Primer
tgcctatggctgtgtctctg

SEQ ID NO: 18314 - DNA, 20 bp, Artificial Sequence
  Chr19q_1 Reverse Primer
aggaacctggaggaggagag

SEQ ID NO: 18315 - DNA, 20 bp, Artificial Sequence
  Chr19q_1 Reverse Primer
gaccctcagcgtccacttta

SEQ ID NO: 18316 - DNA, 20 bp, Artificial Sequence
  Chr19q_1 Reverse Primer
tcttggggtacctcttgtgg

SEQ ID NO: 18317 - DNA, 20 bp, Artificial Sequence
  Chr19q_1 Reverse Primer
ccttggtacagcccagatgt

SEQ ID NO: 18318 - DNA, 20 bp, Artificial Sequence
  Chr19q_1 Reverse Primer
attaggcctgaacctccagc

SEQ ID NO: 18319 - DNA, 20 bp, Artificial Sequence
  Chr19q_1 Reverse Primer
gggtctgggctagaggttct

SEQ ID NO: 18320 - DNA, 20 bp, Artificial Sequence
  Chr19q_1 Reverse Primer
ctctgacatcgtctttcccc

SEQ ID NO: 18321 - DNA, 20 bp, Artificial Sequence
  Chr19q_1 Reverse Primer
cctcaaaggctccaaagaga

SEQ ID NO: 18322 - DNA, 20 bp, Artificial Sequence
  Chr19q_1 Reverse Primer
gcaaaagtctcagggcagac

SEQ ID NO: 18323 - DNA, 20 bp, Artificial Sequence
  Chr19q_1 Reverse Primer
ctgcatggtgtgagtccagt

SEQ ID NO: 18324 - DNA, 20 bp, Artificial Sequence
  Chr19q_1 Reverse Primer
ccacagcatgtttcttgcat

SEQ ID NO: 18325 - DNA, 20 bp, Artificial Sequence
  Chr19q_1 Reverse Primer
atatgcctgaagccatctgc

SEQ ID NO: 18326 - DNA, 20 bp, Artificial Sequence
  Chr19q_1 Reverse Primer
agaggaagaggagcaggagg

SEQ ID NO: 18327 - DNA, 20 bp, Artificial Sequence
  Chr19q_1 Reverse Primer
gacatgtgtcctggctgtgt

SEQ ID NO: 18328 - DNA, 20 bp, Artificial Sequence
  Chr19q_1 Reverse Primer
actgtgaggggaatgacagg

SEQ ID NO: 18329 - DNA, 20 bp, Artificial Sequence
  Chr19q_1 Reverse Primer
ccccaggttgtctgctgtag

SEQ ID NO: 18330 - DNA, 20 bp, Artificial Sequence
  Chr19q_1 Reverse Primer
cacatttgtgccttgtggac

SEQ ID NO: 18331 - DNA, 20 bp, Artificial Sequence
  Chr19q_1 Reverse Primer
ccggacttccttaaccacaa

SEQ ID NO: 18332 - DNA, 20 bp, Artificial Sequence
  Chr19q_1 Reverse Primer
tctgtgagctgctgaatgct

SEQ ID NO: 18333 - DNA, 18 bp, Artificial Sequence
  Chr19q_1 Reverse Primer
cgtcatctctccgccttc

SEQ ID NO: 18334 - DNA, 20 bp, Artificial Sequence
  Chr19q_1 Reverse Primer
acagaaggccgagctcagat

SEQ ID NO: 18335 - DNA, 20 bp, Artificial Sequence
  Chr19q_1 Reverse Primer
tattcactgagccccagacc

SEQ ID NO: 18336 - DNA, 20 bp, Artificial Sequence
  Chr19q_1 Reverse Primer
gttcctttcctcaccctcgt

SEQ ID NO: 18337 - DNA, 20 bp, Artificial Sequence
  Chr19q_1 Reverse Primer
tcaaatccctcctttcatgc

SEQ ID NO: 18338 - DNA, 20 bp, Artificial Sequence
  Chr19q_1 Reverse Primer
gctcagggagacccctttac

SEQ ID NO: 18339 - DNA, 20 bp, Artificial Sequence
  Chr19q_1 Reverse Primer
gccactgtatccaggagcat

SEQ ID NO: 18340 - DNA, 20 bp, Artificial Sequence
  Chr19q_1 Reverse Primer
ccacgcaggttctagctctc

SEQ ID NO: 18341 - DNA, 20 bp, Artificial Sequence
  Chr19q_1 Reverse Primer
ggacgtgtcaaggtacccat

SEQ ID NO: 18342 - DNA, 20 bp, Artificial Sequence
  Chr19q_1 Reverse Primer
ctcccattgttccagcctaa

SEQ ID NO: 18343 - DNA, 20 bp, Artificial Sequence
  Chr19q_1 Reverse Primer
gatgacagaagcttgggagc

SEQ ID NO: 18344 - DNA, 20 bp, Artificial Sequence
  Chr19q_1 Reverse Primer
acggaggaaggagagagagg

SEQ ID NO: 18345 - DNA, 20 bp, Artificial Sequence
  Chr19q_1 Reverse Primer
gcaaaagaatcccagcagag

SEQ ID NO: 18346 - DNA, 23 bp, Artificial Sequence
  Chr19q_1 Reverse Primer
cctagtttctctggggagacaga

SEQ ID NO: 18347 - DNA, 20 bp, Artificial Sequence
  Chr19q_1 Reverse Primer
aacatgggatgggtgtccta

SEQ ID NO: 18348 - DNA, 20 bp, Artificial Sequence
  Chr19q_1 Reverse Primer
taggacaaaggtgccttcca

SEQ ID NO: 18349 - DNA, 25 bp, Artificial Sequence
  Chr19q_1 Reverse Primer
gagatcctacttgattcttttgcag

SEQ ID NO: 18350 - DNA, 20 bp, Artificial Sequence
  Chr19q_1 Reverse Primer
gaaccacagaggcaggagac

SEQ ID NO: 18351 - DNA, 20 bp, Artificial Sequence
  Chr19q_1 Reverse Primer
gtctccaccaagcaccctta

SEQ ID NO: 18352 - DNA, 20 bp, Artificial Sequence
  Chr19q_1 Reverse Primer
gattcccagaggcaagatga

SEQ ID NO: 18353 - DNA, 19 bp, Artificial Sequence
  Chr19q_1 Reverse Primer
cacatgcctgaggacaagg

SEQ ID NO: 18354 - DNA, 20 bp, Artificial Sequence
  Chr19q_1 Reverse Primer
tcatgattggctcaattcca

SEQ ID NO: 18355 - DNA, 20 bp, Artificial Sequence
  Chr19q_1 Reverse Primer
gctccaagcctgaaatgtgt

SEQ ID NO: 18356 - DNA, 20 bp, Artificial Sequence
  Chr19q_1 Reverse Primer
gcagcagaaaggacagagga

SEQ ID NO: 18357 - DNA, 20 bp, Artificial Sequence
  Chr19q_1 Reverse Primer
agaaggcaggtaggaggagg

SEQ ID NO: 18358 - DNA, 20 bp, Artificial Sequence
  Chr19q_1 Reverse Primer
gggcctcccagttaacttct

SEQ ID NO: 18359 - DNA, 20 bp, Artificial Sequence
  Chr19q_1 Reverse Primer
gctaatgattcccacgtgct

SEQ ID NO: 18360 - DNA, 20 bp, Artificial Sequence
  Chr19q_1 Reverse Primer
agtgggccttcagtctcgta

SEQ ID NO: 18361 - DNA, 20 bp, Artificial Sequence
  Chr19q_1 Reverse Primer
tgacagatcactcccagcac

SEQ ID NO: 18362 - DNA, 20 bp, Artificial Sequence
  Chr19q_1 Reverse Primer
acacagcctctcttccctga

SEQ ID NO: 18363 - DNA, 20 bp, Artificial Sequence
  Chr19q_1 Reverse Primer
cggggaggaggtaagatttc

SEQ ID NO: 18364 - DNA, 20 bp, Artificial Sequence
  Chr19q_1 Reverse Primer
cctgtcttggcctcctactg

SEQ ID NO: 18365 - DNA, 20 bp, Artificial Sequence
  Chr19q_1 Reverse Primer
agccttttctaggcagagcc

SEQ ID NO: 18366 - DNA, 20 bp, Artificial Sequence
  Chr19q_1 Reverse Primer
agccagacaaatgtggaacc

SEQ ID NO: 18367 - DNA, 20 bp, Artificial Sequence
  Chr19q_1 Reverse Primer
ccagatggaatctctgggaa

SEQ ID NO: 18368 - DNA, 20 bp, Artificial Sequence
  Chr19q_1 Reverse Primer
gaatctgtgaacgtggggtt

SEQ ID NO: 18369 - DNA, 20 bp, Artificial Sequence
  Chr19q_1 Reverse Primer
tttatggaggcagcagcttt

SEQ ID NO: 18370 - DNA, 20 bp, Artificial Sequence
  Chr19q_1 Reverse Primer
acagccttcaggaagaacca

SEQ ID NO: 18371 - DNA, 20 bp, Artificial Sequence
  Chr19q_1 Reverse Primer
actccttcccctcctctctg

SEQ ID NO: 18372 - DNA, 20 bp, Artificial Sequence
  Chr19q_1 Reverse Primer
ttagctttacctgcctgcgt

SEQ ID NO: 18373 - DNA, 20 bp, Artificial Sequence
  Chr19q_1 Reverse Primer
acactccccactgcattcat

SEQ ID NO: 18374 - DNA, 20 bp, Artificial Sequence
  Chr19q_1 Reverse Primer
gagccctttgtgcagacttc

SEQ ID NO: 18375 - DNA, 20 bp, Artificial Sequence
  Chr19q_1 Reverse Primer
gagctctccatccatcctga

SEQ ID NO: 18376 - DNA, 20 bp, Artificial Sequence
  Chr19q_1 Reverse Primer
cctttccttttggttttggg

SEQ ID NO: 18377 - DNA, 20 bp, Artificial Sequence
  Chr19q_1 Reverse Primer
gtatgccttcagcattgcct

SEQ ID NO: 18378 - DNA, 20 bp, Artificial Sequence
  Chr19q_1 Reverse Primer
ggggtggaaacatagggact

SEQ ID NO: 18379 - DNA, 20 bp, Artificial Sequence
  Chr19q_1 Reverse Primer
actaggagattccggtgcct

SEQ ID NO: 18380 - DNA, 20 bp, Artificial Sequence
  Chr19q_1 Reverse Primer
ctggagctgaccagtgacaa

SEQ ID NO: 18381 - DNA, 18 bp, Artificial Sequence
  Chr19q_1 Reverse Primer
gcggcgactttgactacc

SEQ ID NO: 18382 - DNA, 21 bp, Artificial Sequence
  Chr19q_1 Reverse Primer
ctctaactcccccatggagtc

SEQ ID NO: 18383 - DNA, 20 bp, Artificial Sequence
  Chr19q_1 Reverse Primer
gctccgacctggagaagtaa

SEQ ID NO: 18384 - DNA, 20 bp, Artificial Sequence
  Chr19q_1 Reverse Primer
taggatcccggggactacag

SEQ ID NO: 18385 - DNA, 20 bp, Artificial Sequence
  Chr19q_1 Reverse Primer
ccagcggtgtttttagctgt

SEQ ID NO: 18386 - DNA, 20 bp, Artificial Sequence
  Chr19q_1 Reverse Primer
gctttttgatttccgtccag

SEQ ID NO: 18387 - DNA, 20 bp, Artificial Sequence
  Chr19q_1 Reverse Primer
agccccctattggacaaagt

SEQ ID NO: 18388 - DNA, 20 bp, Artificial Sequence
  Chr19q_1 Reverse Primer
cttgattcccatttgtgcct

SEQ ID NO: 18389 - DNA, 21 bp, Artificial Sequence
  Chr19q_2 Forward Primer
ccatttaggaaaggactggga

SEQ ID NO: 18390 - DNA, 20 bp, Artificial Sequence
  Chr19q_2 Forward Primer
gggaaacttgagttgggtga

SEQ ID NO: 18391 - DNA, 20 bp, Artificial Sequence
  Chr19q_2 Forward Primer
acactgtaaagccattgccc

SEQ ID NO: 18392 - DNA, 20 bp, Artificial Sequence
  Chr19q_2 Forward Primer
tgggcaggatttatgtggtt

SEQ ID NO: 18393 - DNA, 20 bp, Artificial Sequence
  Chr19q_2 Forward Primer
ttcttcctgtgtgacctcca

SEQ ID NO: 18394 - DNA, 20 bp, Artificial Sequence
  Chr19q_2 Forward Primer
gtccagcgaccgtgtttaat

SEQ ID NO: 18395 - DNA, 20 bp, Artificial Sequence
  Chr19q_2 Forward Primer
cctgcggctgttgaataagt

SEQ ID NO: 18396 - DNA, 20 bp, Artificial Sequence
  Chr19q_2 Forward Primer
ttggcagtgacttgcagaga

SEQ ID NO: 18397 - DNA, 20 bp, Artificial Sequence
  Chr19q_2 Forward Primer
ccctccttccctcaagtctc

SEQ ID NO: 18398 - DNA, 20 bp, Artificial Sequence
  Chr19q_2 Forward Primer
gagggtgtcagcttttccag

SEQ ID NO: 18399 - DNA, 20 bp, Artificial Sequence
  Chr19q_2 Forward Primer
aggcacagttgagccatctc

SEQ ID NO: 18400 - DNA, 20 bp, Artificial Sequence
  Chr19q_2 Forward Primer
catgtcaggacctgctgcta

SEQ ID NO: 18401 - DNA, 20 bp, Artificial Sequence
  Chr19q_2 Forward Primer
ttcttttcaagccccttttt

SEQ ID NO: 18402 - DNA, 20 bp, Artificial Sequence
  Chr19q_2 Forward Primer
atgcctctgagtccttgcat

SEQ ID NO: 18403 - DNA, 20 bp, Artificial Sequence
  Chr19q_2 Forward Primer
gagggttctcaccaagtcca

SEQ ID NO: 18404 - DNA, 20 bp, Artificial Sequence
  Chr19q_2 Forward Primer
tcttgggacctctcctttca

SEQ ID NO: 18405 - DNA, 20 bp, Artificial Sequence
  Chr19q_2 Forward Primer
accagggctctaaggaaagg

SEQ ID NO: 18406 - DNA, 20 bp, Artificial Sequence
  Chr19q_2 Forward Primer
gggcttctcccaaagactgt

SEQ ID NO: 18407 - DNA, 20 bp, Artificial Sequence
  Chr19q_2 Forward Primer
gtgcacatggacaagcattt

SEQ ID NO: 18408 - DNA, 20 bp, Artificial Sequence
  Chr19q_2 Forward Primer
gcttacacctttgcccagaa

SEQ ID NO: 18409 - DNA, 20 bp, Artificial Sequence
  Chr19q_2 Forward Primer
ccccacttttggttctttga

SEQ ID NO: 18410 - DNA, 20 bp, Artificial Sequence
  Chr19q_2 Forward Primer
caccacccaccctctactgt

SEQ ID NO: 18411 - DNA, 20 bp, Artificial Sequence
  Chr19q_2 Forward Primer
tagagagaacctgcccctca

SEQ ID NO: 18412 - DNA, 20 bp, Artificial Sequence
  Chr19q_2 Forward Primer
gtcatctcattgtgtgggca

SEQ ID NO: 18413 - DNA, 20 bp, Artificial Sequence
  Chr19q_2 Forward Primer
gggctctactccattgcaga

SEQ ID NO: 18414 - DNA, 20 bp, Artificial Sequence
  Chr19q_2 Forward Primer
tcattgtttaggttggggga

SEQ ID NO: 18415 - DNA, 20 bp, Artificial Sequence
  Chr19q_2 Forward Primer
actgaggcccagagaagtga

SEQ ID NO: 18416 - DNA, 20 bp, Artificial Sequence
  Chr19q_2 Forward Primer
agaaaacggggactttcgat

SEQ ID NO: 18417 - DNA, 24 bp, Artificial Sequence
  Chr19q_2 Forward Primer
ttcagaggcttcttaatttttgtg

SEQ ID NO: 18418 - DNA, 20 bp, Artificial Sequence
  Chr19q_2 Forward Primer
accgaagcacaaagaggtgt

SEQ ID NO: 18419 - DNA, 20 bp, Artificial Sequence
  Chr19q_2 Forward Primer
caatgtcagatgccagtgga

SEQ ID NO: 18420 - DNA, 21 bp, Artificial Sequence
  Chr19q_2 Forward Primer
tgtgggtaggcagataccact

SEQ ID NO: 18421 - DNA, 20 bp, Artificial Sequence
  Chr19q_2 Forward Primer
ggcctctaaagaggttgcct

SEQ ID NO: 18422 - DNA, 20 bp, Artificial Sequence
  Chr19q_2 Forward Primer
gaggcctaggacttgcactg

SEQ ID NO: 18423 - DNA, 20 bp, Artificial Sequence
  Chr19q_2 Forward Primer
ccggatggtgctctacagtt

SEQ ID NO: 18424 - DNA, 20 bp, Artificial Sequence
  Chr19q_2 Forward Primer
tcctgatcacacttgaacgc

SEQ ID NO: 18425 - DNA, 20 bp, Artificial Sequence
  Chr19q_2 Forward Primer
cttctggggaaatgctgtgt

SEQ ID NO: 18426 - DNA, 20 bp, Artificial Sequence
  Chr19q_2 Forward Primer
gatatggcagggaatctgga

SEQ ID NO: 18427 - DNA, 23 bp, Artificial Sequence
  Chr19q_2 Forward Primer
ttcagttttgggagaattgtcat

SEQ ID NO: 18428 - DNA, 20 bp, Artificial Sequence
  Chr19q_2 Forward Primer
gcccaggatccttctcaaat

SEQ ID NO: 18429 - DNA, 20 bp, Artificial Sequence
  Chr19q_2 Forward Primer
caaatcttcccttgagcagc

SEQ ID NO: 18430 - DNA, 21 bp, Artificial Sequence
  Chr19q_2 Forward Primer
aagcccctgtatacctccttg

SEQ ID NO: 18431 - DNA, 20 bp, Artificial Sequence
  Chr19q_2 Forward Primer
tggtcctgaaaaatgttccc

SEQ ID NO: 18432 - DNA, 20 bp, Artificial Sequence
  Chr19q_2 Forward Primer
gaaggagacaggctggtttg

SEQ ID NO: 18433 - DNA, 23 bp, Artificial Sequence
  Chr19q_2 Forward Primer
cattttcttttccctcttttgtg

SEQ ID NO: 18434 - DNA, 20 bp, Artificial Sequence
  Chr19q_2 Forward Primer
cctttggttcagcatggttt

SEQ ID NO: 18435 - DNA, 20 bp, Artificial Sequence
  Chr19q_2 Forward Primer
tcattccctggatcttcctg

SEQ ID NO: 18436 - DNA, 23 bp, Artificial Sequence
  Chr19q_2 Forward Primer
tgttcccactgttcttacttgaa

SEQ ID NO: 18437 - DNA, 22 bp, Artificial Sequence
  Chr19q_2 Forward Primer
ccagaagtctttccaaatttcc

SEQ ID NO: 18438 - DNA, 20 bp, Artificial Sequence
  Chr19q_2 Forward Primer
gaggcctggacatcagcata

SEQ ID NO: 18439 - DNA, 20 bp, Artificial Sequence
  Chr19q_2 Forward Primer
cctgtctctccaggcttcat

SEQ ID NO: 18440 - DNA, 20 bp, Artificial Sequence
  Chr19q_2 Forward Primer
attttaatgctgcccactgc

SEQ ID NO: 18441 - DNA, 20 bp, Artificial Sequence
  Chr19q_2 Forward Primer
gacagagctccctttcctcc

SEQ ID NO: 18442 - DNA, 20 bp, Artificial Sequence
  Chr19q_2 Forward Primer
cctcctccccagtgttttct

SEQ ID NO: 18443 - DNA, 20 bp, Artificial Sequence
  Chr19q_2 Forward Primer
aatgggacaattgcagtcct

SEQ ID NO: 18444 - DNA, 20 bp, Artificial Sequence
  Chr19q_2 Forward Primer
tgatctcccaagttggttcc

SEQ ID NO: 18445 - DNA, 20 bp, Artificial Sequence
  Chr19q_2 Forward Primer
ttactgcacaccagccagtc

SEQ ID NO: 18446 - DNA, 20 bp, Artificial Sequence
  Chr19q_2 Forward Primer
ttaatgcccgtcttcctcac

SEQ ID NO: 18447 - DNA, 20 bp, Artificial Sequence
  Chr19q_2 Forward Primer
taaaaccctggcggtgaaat

SEQ ID NO: 18448 - DNA, 20 bp, Artificial Sequence
  Chr19q_2 Forward Primer
atctgaagaggccaggacag

SEQ ID NO: 18449 - DNA, 20 bp, Artificial Sequence
  Chr19q_2 Forward Primer
agcttcagcagtcattgggt

SEQ ID NO: 18450 - DNA, 20 bp, Artificial Sequence
  Chr19q_2 Forward Primer
gagggagtagcgtatgcctg

SEQ ID NO: 18451 - DNA, 20 bp, Artificial Sequence
  Chr19q_2 Forward Primer
agagggattgatgtgttggc

SEQ ID NO: 18452 - DNA, 20 bp, Artificial Sequence
  Chr19q_2 Forward Primer
gagagagagcgaggagagca

SEQ ID NO: 18453 - DNA, 20 bp, Artificial Sequence
  Chr19q_2 Forward Primer
cccatttcattggtggatgt

SEQ ID NO: 18454 - DNA, 20 bp, Artificial Sequence
  Chr19q_2 Forward Primer
aagatggctgctcttggaga

SEQ ID NO: 18455 - DNA, 20 bp, Artificial Sequence
  Chr19q_2 Forward Primer
tggggtgtctctcagtggat

SEQ ID NO: 18456 - DNA, 20 bp, Artificial Sequence
  Chr19q_2 Forward Primer
gaaacagttgtccccaggaa

SEQ ID NO: 18457 - DNA, 20 bp, Artificial Sequence
  Chr19q_2 Forward Primer
aggatgaggttcagaggggt

SEQ ID NO: 18458 - DNA, 20 bp, Artificial Sequence
  Chr19q_2 Forward Primer
ctgagctgtgcaaagggatt

SEQ ID NO: 18459 - DNA, 20 bp, Artificial Sequence
  Chr19q_2 Forward Primer
cttgcgtgctaactgtgctc

SEQ ID NO: 18460 - DNA, 20 bp, Artificial Sequence
  Chr19q_2 Forward Primer
tctcacaggccttccttgac

SEQ ID NO: 18461 - DNA, 18 bp, Artificial Sequence
  Chr19q_2 Forward Primer
ctccagagcagggggaag

SEQ ID NO: 18462 - DNA, 20 bp, Artificial Sequence
  Chr19q_2 Forward Primer
attggggctggttaatgatg

SEQ ID NO: 18463 - DNA, 20 bp, Artificial Sequence
  Chr19q_2 Forward Primer
ttcttgtccgtgttgagcag

SEQ ID NO: 18464 - DNA, 20 bp, Artificial Sequence
  Chr19q_2 Forward Primer
ttttctgcaggacaccttcc

SEQ ID NO: 18465 - DNA, 20 bp, Artificial Sequence
  Chr19q_2 Forward Primer
ccgtgatatgtggcaaaaca

SEQ ID NO: 18466 - DNA, 20 bp, Artificial Sequence
  Chr19q_2 Forward Primer
ttgatctttgcagatggctg

SEQ ID NO: 18467 - DNA, 20 bp, Artificial Sequence
  Chr19q_2 Forward Primer
tccaagggctgtatagtggc

SEQ ID NO: 18468 - DNA, 20 bp, Artificial Sequence
  Chr19q_2 Forward Primer
gccatgttgaaattgccttt

SEQ ID NO: 18469 - DNA, 20 bp, Artificial Sequence
  Chr19q_2 Forward Primer
gcctcggtattcatttctgc

SEQ ID NO: 18470 - DNA, 20 bp, Artificial Sequence
  Chr19q_2 Forward Primer
ctctcatgcaggcaactctg

SEQ ID NO: 18471 - DNA, 23 bp, Artificial Sequence
  Chr19q_2 Forward Primer
agaaaagaaaggaaaggaaggaa

SEQ ID NO: 18472 - DNA, 20 bp, Artificial Sequence
  Chr19q_2 Forward Primer
ttccatcctaggggtgtttg

SEQ ID NO: 18473 - DNA, 20 bp, Artificial Sequence
  Chr19q_2 Forward Primer
gcttcctggatagagccaca

SEQ ID NO: 18474 - DNA, 21 bp, Artificial Sequence
  Chr19q_2 Forward Primer
cttctgtttctccacaccagc

SEQ ID NO: 18475 - DNA, 20 bp, Artificial Sequence
  Chr19q_2 Forward Primer
tttcttaaccctggctgcac

SEQ ID NO: 18476 - DNA, 20 bp, Artificial Sequence
  Chr19q_2 Forward Primer
atagaggtggggcagtgttg

SEQ ID NO: 18477 - DNA, 20 bp, Artificial Sequence
  Chr19q_2 Forward Primer
atttgtgttgggagagtggg

SEQ ID NO: 18478 - DNA, 20 bp, Artificial Sequence
  Chr19q_2 Forward Primer
gcgaagcttcccttaggttt

SEQ ID NO: 18479 - DNA, 19 bp, Artificial Sequence
  Chr19q_2 Forward Primer
gtggcacagccagaatgag

SEQ ID NO: 18480 - DNA, 20 bp, Artificial Sequence
  Chr19q_2 Forward Primer
ctggaagaattcccaggtca

SEQ ID NO: 18481 - DNA, 20 bp, Artificial Sequence
  Chr19q_2 Forward Primer
atacctgtggaactttggcg

SEQ ID NO: 18482 - DNA, 20 bp, Artificial Sequence
  Chr19q_2 Forward Primer
ccagcagacatctctgtcca

SEQ ID NO: 18483 - DNA, 20 bp, Artificial Sequence
  Chr19q_2 Forward Primer
catctggcttccaattccat

SEQ ID NO: 18484 - DNA, 20 bp, Artificial Sequence
  Chr19q_2 Forward Primer
gatgctttggagctggagac

SEQ ID NO: 18485 - DNA, 20 bp, Artificial Sequence
  Chr19q_2 Reverse Primer
gtgcacagtttcaaaggtgg

SEQ ID NO: 18486 - DNA, 20 bp, Artificial Sequence
  Chr19q_2 Reverse Primer
aagcacttgactggcatcct

SEQ ID NO: 18487 - DNA, 20 bp, Artificial Sequence
  Chr19q_2 Reverse Primer
cccaacaacctaggaggaca

SEQ ID NO: 18488 - DNA, 20 bp, Artificial Sequence
  Chr19q_2 Reverse Primer
atgctgccctcagagtcagt

SEQ ID NO: 18489 - DNA, 20 bp, Artificial Sequence
  Chr19q_2 Reverse Primer
aagcacaactgaacggcttt

SEQ ID NO: 18490 - DNA, 20 bp, Artificial Sequence
  Chr19q_2 Reverse Primer
cgcctattacctcggattca

SEQ ID NO: 18491 - DNA, 20 bp, Artificial Sequence
  Chr19q_2 Reverse Primer
ctctgatcacaaagtgggca

SEQ ID NO: 18492 - DNA, 20 bp, Artificial Sequence
  Chr19q_2 Reverse Primer
tcaccgattccttctcttgg

SEQ ID NO: 18493 - DNA, 20 bp, Artificial Sequence
  Chr19q_2 Reverse Primer
ggatggacacaaaagtgcct

SEQ ID NO: 18494 - DNA, 20 bp, Artificial Sequence
  Chr19q_2 Reverse Primer
taggccaagctttcctgttc

SEQ ID NO: 18495 - DNA, 20 bp, Artificial Sequence
  Chr19q_2 Reverse Primer
gaaggccactgacctcactc

SEQ ID NO: 18496 - DNA, 20 bp, Artificial Sequence
  Chr19q_2 Reverse Primer
agataaggaacctgtggccc

SEQ ID NO: 18497 - DNA, 21 bp, Artificial Sequence
  Chr19q_2 Reverse Primer
tgtgagaagagcaaaatgcaa

SEQ ID NO: 18498 - DNA, 20 bp, Artificial Sequence
  Chr19q_2 Reverse Primer
gccaaacaggttggacatct

SEQ ID NO: 18499 - DNA, 21 bp, Artificial Sequence
  Chr19q_2 Reverse Primer
cccaacaaaaatctcttgcac

SEQ ID NO: 18500 - DNA, 20 bp, Artificial Sequence
  Chr19q_2 Reverse Primer
ccacacctcctggaacttgt

SEQ ID NO: 18501 - DNA, 20 bp, Artificial Sequence
  Chr19q_2 Reverse Primer
atgcccaacatgtccactct

SEQ ID NO: 18502 - DNA, 20 bp, Artificial Sequence
  Chr19q_2 Reverse Primer
tcatagggccactgtgaaga

SEQ ID NO: 18503 - DNA, 20 bp, Artificial Sequence
  Chr19q_2 Reverse Primer
cctatccactaggctggcaa

SEQ ID NO: 18504 - DNA, 20 bp, Artificial Sequence
  Chr19q_2 Reverse Primer
gtctgatggctcctttcagc

SEQ ID NO: 18505 - DNA, 20 bp, Artificial Sequence
  Chr19q_2 Reverse Primer
atgcccagcctcctttattt

SEQ ID NO: 18506 - DNA, 20 bp, Artificial Sequence
  Chr19q_2 Reverse Primer
gttgggtcctgattggaaca

SEQ ID NO: 18507 - DNA, 20 bp, Artificial Sequence
  Chr19q_2 Reverse Primer
gagaccggcaaatgtcaaat

SEQ ID NO: 18508 - DNA, 20 bp, Artificial Sequence
  Chr19q_2 Reverse Primer
ctcttgccccaagcataaag

SEQ ID NO: 18509 - DNA, 20 bp, Artificial Sequence
  Chr19q_2 Reverse Primer
caataaatcttctgccccca

SEQ ID NO: 18510 - DNA, 20 bp, Artificial Sequence
  Chr19q_2 Reverse Primer
actccactctcagctggcat

SEQ ID NO: 18511 - DNA, 20 bp, Artificial Sequence
  Chr19q_2 Reverse Primer
tggatttgatcccctcttga

SEQ ID NO: 18512 - DNA, 20 bp, Artificial Sequence
  Chr19q_2 Reverse Primer
gctggctgaggtgtcacata

SEQ ID NO: 18513 - DNA, 21 bp, Artificial Sequence
  Chr19q_2 Reverse Primer
ggcccaggagctagatcttta

SEQ ID NO: 18514 - DNA, 20 bp, Artificial Sequence
  Chr19q_2 Reverse Primer
tccagcatagggaaagtgct

SEQ ID NO: 18515 - DNA, 20 bp, Artificial Sequence
  Chr19q_2 Reverse Primer
aattgtgcttgatgtcagcg

SEQ ID NO: 18516 - DNA, 20 bp, Artificial Sequence
  Chr19q_2 Reverse Primer
gcctccctcaatctctagca

SEQ ID NO: 18517 - DNA, 20 bp, Artificial Sequence
  Chr19q_2 Reverse Primer
aacctaaggtccacctggct

SEQ ID NO: 18518 - DNA, 20 bp, Artificial Sequence
  Chr19q_2 Reverse Primer
tgagaggtgaccatctgtgg

SEQ ID NO: 18519 - DNA, 20 bp, Artificial Sequence
  Chr19q_2 Reverse Primer
gcagggaacttgggatctct

SEQ ID NO: 18520 - DNA, 20 bp, Artificial Sequence
  Chr19q_2 Reverse Primer
agaagaaggaaaagtgccgc

SEQ ID NO: 18521 - DNA, 20 bp, Artificial Sequence
  Chr19q_2 Reverse Primer
cccaaaagaatggtgaatgg

SEQ ID NO: 18522 - DNA, 20 bp, Artificial Sequence
  Chr19q_2 Reverse Primer
tgttcagccaacactggttt

SEQ ID NO: 18523 - DNA, 26 bp, Artificial Sequence
  Chr19q_2 Reverse Primer
tacaaaagtttaaagaggaagatgaa

SEQ ID NO: 18524 - DNA, 20 bp, Artificial Sequence
  Chr19q_2 Reverse Primer
acctggggaggtacacactg

SEQ ID NO: 18525 - DNA, 20 bp, Artificial Sequence
  Chr19q_2 Reverse Primer
taatcctggctaacccatgc

SEQ ID NO: 18526 - DNA, 21 bp, Artificial Sequence
  Chr19q_2 Reverse Primer
tgattgctttcagcttctgtg

SEQ ID NO: 18527 - DNA, 20 bp, Artificial Sequence
  Chr19q_2 Reverse Primer
catcaatattggtttcgggg

SEQ ID NO: 18528 - DNA, 20 bp, Artificial Sequence
  Chr19q_2 Reverse Primer
cacctctggacttcccactc

SEQ ID NO: 18529 - DNA, 23 bp, Artificial Sequence
  Chr19q_2 Reverse Primer
ggaaaagaggccatataactcca

SEQ ID NO: 18530 - DNA, 20 bp, Artificial Sequence
  Chr19q_2 Reverse Primer
gtgcaagggagacaccagat

SEQ ID NO: 18531 - DNA, 20 bp, Artificial Sequence
  Chr19q_2 Reverse Primer
tttaatttggggttcctccc

SEQ ID NO: 18532 - DNA, 22 bp, Artificial Sequence
  Chr19q_2 Reverse Primer
caaaagtcaaagctgctaacca

SEQ ID NO: 18533 - DNA, 20 bp, Artificial Sequence
  Chr19q_2 Reverse Primer
gaggagtgggcaaagtcaga

SEQ ID NO: 18534 - DNA, 20 bp, Artificial Sequence
  Chr19q_2 Reverse Primer
ggccataaaaattgatccca

SEQ ID NO: 18535 - DNA, 20 bp, Artificial Sequence
  Chr19q_2 Reverse Primer
gagtgggtggagaactgagc

SEQ ID NO: 18536 - DNA, 20 bp, Artificial Sequence
  Chr19q_2 Reverse Primer
gagcaagtcactgcaaagca

SEQ ID NO: 18537 - DNA, 20 bp, Artificial Sequence
  Chr19q_2 Reverse Primer
ctacagaacagagcctgccc

SEQ ID NO: 18538 - DNA, 20 bp, Artificial Sequence
  Chr19q_2 Reverse Primer
ctccactgttgttctgccct

SEQ ID NO: 18539 - DNA, 20 bp, Artificial Sequence
  Chr19q_2 Reverse Primer
tctccatttccttcggacag

SEQ ID NO: 18540 - DNA, 20 bp, Artificial Sequence
  Chr19q_2 Reverse Primer
ccctggtcatagcaatggtt

SEQ ID NO: 18541 - DNA, 20 bp, Artificial Sequence
  Chr19q_2 Reverse Primer
caggaataacaagcggccta

SEQ ID NO: 18542 - DNA, 21 bp, Artificial Sequence
  Chr19q_2 Reverse Primer
ttgttccctgctctagtccaa

SEQ ID NO: 18543 - DNA, 26 bp, Artificial Sequence
  Chr19q_2 Reverse Primer
ggctaattaaaaatgtgtgttaatcg

SEQ ID NO: 18544 - DNA, 20 bp, Artificial Sequence
  Chr19q_2 Reverse Primer
ctctgcacagaagctgaacg

SEQ ID NO: 18545 - DNA, 20 bp, Artificial Sequence
  Chr19q_2 Reverse Primer
aggaacagggagcaacaaga

SEQ ID NO: 18546 - DNA, 20 bp, Artificial Sequence
  Chr19q_2 Reverse Primer
ctgagaagccaaaccacaca

SEQ ID NO: 18547 - DNA, 20 bp, Artificial Sequence
  Chr19q_2 Reverse Primer
aacaaatactgccaggcacc

SEQ ID NO: 18548 - DNA, 20 bp, Artificial Sequence
  Chr19q_2 Reverse Primer
gccgtctcctcagagttcag

SEQ ID NO: 18549 - DNA, 20 bp, Artificial Sequence
  Chr19q_2 Reverse Primer
tccctgtcaagcagtcctct

SEQ ID NO: 18550 - DNA, 20 bp, Artificial Sequence
  Chr19q_2 Reverse Primer
cagggtgcctgagttgattt

SEQ ID NO: 18551 - DNA, 24 bp, Artificial Sequence
  Chr19q_2 Reverse Primer
caacttactgaatcctcaaagcaa

SEQ ID NO: 18552 - DNA, 20 bp, Artificial Sequence
  Chr19q_2 Reverse Primer
aggagaccgtgcaaatcact

SEQ ID NO: 18553 - DNA, 20 bp, Artificial Sequence
  Chr19q_2 Reverse Primer
ttagcgactgcattccacag

SEQ ID NO: 18554 - DNA, 20 bp, Artificial Sequence
  Chr19q_2 Reverse Primer
aaaacaggctgtgcatggta

SEQ ID NO: 18555 - DNA, 20 bp, Artificial Sequence
  Chr19q_2 Reverse Primer
actgtctgactctccccacc

SEQ ID NO: 18556 - DNA, 20 bp, Artificial Sequence
  Chr19q_2 Reverse Primer
acggatacccaagggaaaat

SEQ ID NO: 18557 - DNA, 20 bp, Artificial Sequence
  Chr19q_2 Reverse Primer
ttggcctctccttggtcata

SEQ ID NO: 18558 - DNA, 20 bp, Artificial Sequence
  Chr19q_2 Reverse Primer
taccctccaaacaaagcctg

SEQ ID NO: 18559 - DNA, 20 bp, Artificial Sequence
  Chr19q_2 Reverse Primer
cactgctgctgaaatgatgg

SEQ ID NO: 18560 - DNA, 20 bp, Artificial Sequence
  Chr19q_2 Reverse Primer
tattctgtgtgggaggcgat

SEQ ID NO: 18561 - DNA, 20 bp, Artificial Sequence
  Chr19q_2 Reverse Primer
gacctgccctgaagaaactg

SEQ ID NO: 18562 - DNA, 20 bp, Artificial Sequence
  Chr19q_2 Reverse Primer
gggcttgtctccatgtctgt

SEQ ID NO: 18563 - DNA, 20 bp, Artificial Sequence
  Chr19q_2 Reverse Primer
acctgtaaggtgggtcctga

SEQ ID NO: 18564 - DNA, 20 bp, Artificial Sequence
  Chr19q_2 Reverse Primer
ctagcccagatgtggcattt

SEQ ID NO: 18565 - DNA, 20 bp, Artificial Sequence
  Chr19q_2 Reverse Primer
ccatattccacagcagccta

SEQ ID NO: 18566 - DNA, 20 bp, Artificial Sequence
  Chr19q_2 Reverse Primer
ccaggacagcaaggactagg

SEQ ID NO: 18567 - DNA, 20 bp, Artificial Sequence
  Chr19q_2 Reverse Primer
caaatccctcccaacacatt

SEQ ID NO: 18568 - DNA, 20 bp, Artificial Sequence
  Chr19q_2 Reverse Primer
aggacaaccacattcttggc

SEQ ID NO: 18569 - DNA, 20 bp, Artificial Sequence
  Chr19q_2 Reverse Primer
gagaaagccatctcacctcg

SEQ ID NO: 18570 - DNA, 20 bp, Artificial Sequence
  Chr19q_2 Reverse Primer
caagcaagagcagtcccttt

SEQ ID NO: 18571 - DNA, 20 bp, Artificial Sequence
  Chr19q_2 Reverse Primer
cccaggtggttctcagctac

SEQ ID NO: 18572 - DNA, 20 bp, Artificial Sequence
  Chr19q_2 Reverse Primer
gggacagtggctgtcaaagt

SEQ ID NO: 18573 - DNA, 20 bp, Artificial Sequence
  Chr19q_2 Reverse Primer
ggagccagcaggataatgag

SEQ ID NO: 18574 - DNA, 20 bp, Artificial Sequence
  Chr19q_2 Reverse Primer
ctcctcaatcacacagccaa

SEQ ID NO: 18575 - DNA, 20 bp, Artificial Sequence
  Chr19q_2 Reverse Primer
acagaggaaacgccagagaa

SEQ ID NO: 18576 - DNA, 20 bp, Artificial Sequence
  Chr19q_2 Reverse Primer
tagtgcccaacatgcaagag

SEQ ID NO: 18577 - DNA, 20 bp, Artificial Sequence
  Chr19q_2 Reverse Primer
agaggacacgttagcccaga

SEQ ID NO: 18578 - DNA, 20 bp, Artificial Sequence
  Chr19q_2 Reverse Primer
tggacaagttacctcccctc

SEQ ID NO: 18579 - DNA, 20 bp, Artificial Sequence
  Chr19q_2 Reverse Primer
gccttcaggttttcctccat

SEQ ID NO: 18580 - DNA, 20 bp, Artificial Sequence
  Chr19q_2 Reverse Primer
tgaagagcctgaggaaggag

SEQ ID NO: 18581 - DNA, 20 bp, Artificial Sequence
  Chr19q_3 Forward Primer
gggagggtttgtttccttgt

SEQ ID NO: 18582 - DNA, 20 bp, Artificial Sequence
  Chr19q_3 Forward Primer
ccacacagaaggggtgctat

SEQ ID NO: 18583 - DNA, 20 bp, Artificial Sequence
  Chr19q_3 Forward Primer
gtgccctgaagagtccagag

SEQ ID NO: 18584 - DNA, 20 bp, Artificial Sequence
  Chr19q_3 Forward Primer
cttcctgacctgccatgagt

SEQ ID NO: 18585 - DNA, 20 bp, Artificial Sequence
  Chr19q_3 Forward Primer
gctctccctttcactgcatc

SEQ ID NO: 18586 - DNA, 20 bp, Artificial Sequence
  Chr19q_3 Forward Primer
ggtgatggcatctcacactg

SEQ ID NO: 18587 - DNA, 20 bp, Artificial Sequence
  Chr19q_3 Forward Primer
catagtcttcagcgttgcca

SEQ ID NO: 18588 - DNA, 20 bp, Artificial Sequence
  Chr19q_3 Forward Primer
cctaggctggacatcagacc

SEQ ID NO: 18589 - DNA, 20 bp, Artificial Sequence
  Chr19q_3 Forward Primer
ctcatgcagctctaggtccc

SEQ ID NO: 18590 - DNA, 19 bp, Artificial Sequence
  Chr19q_3 Forward Primer
tccacagactggacatggg

SEQ ID NO: 18591 - DNA, 20 bp, Artificial Sequence
  Chr19q_3 Forward Primer
ggactggtctgacactggct

SEQ ID NO: 18592 - DNA, 20 bp, Artificial Sequence
  Chr19q_3 Forward Primer
ctgaggaaacgagggttcag

SEQ ID NO: 18593 - DNA, 20 bp, Artificial Sequence
  Chr19q_3 Forward Primer
ctcaatgcaagagtgcctga

SEQ ID NO: 18594 - DNA, 20 bp, Artificial Sequence
  Chr19q_3 Forward Primer
ctacgtcctggcgtttgatg

SEQ ID NO: 18595 - DNA, 20 bp, Artificial Sequence
  Chr19q_3 Forward Primer
attcacgttttgaggatcgc

SEQ ID NO: 18596 - DNA, 19 bp, Artificial Sequence
  Chr19q_3 Forward Primer
ctcatcctggggcttcaat

SEQ ID NO: 18597 - DNA, 19 bp, Artificial Sequence
  Chr19q_3 Forward Primer
cccctgagtcccttgtcat

SEQ ID NO: 18598 - DNA, 20 bp, Artificial Sequence
  Chr19q_3 Forward Primer
ggcactttgtcctgacccta

SEQ ID NO: 18599 - DNA, 20 bp, Artificial Sequence
  Chr19q_3 Forward Primer
cagaggagtgcagaaaagcc

SEQ ID NO: 18600 - DNA, 20 bp, Artificial Sequence
  Chr19q_3 Forward Primer
gtggtgccatgtatctgctg

SEQ ID NO: 18601 - DNA, 20 bp, Artificial Sequence
  Chr19q_3 Forward Primer
tgggacacagcttcactcag

SEQ ID NO: 18602 - DNA, 20 bp, Artificial Sequence
  Chr19q_3 Forward Primer
atccactgctgtgctctgtg

SEQ ID NO: 18603 - DNA, 20 bp, Artificial Sequence
  Chr19q_3 Forward Primer
tttgaacccaactgagaggg

SEQ ID NO: 18604 - DNA, 20 bp, Artificial Sequence
  Chr19q_3 Forward Primer
taactaagcgacacccccac

SEQ ID NO: 18605 - DNA, 20 bp, Artificial Sequence
  Chr19q_3 Forward Primer
ttcagtccacacgtttccaa

SEQ ID NO: 18606 - DNA, 20 bp, Artificial Sequence
  Chr19q_3 Forward Primer
agagggttaggattgggtgg

SEQ ID NO: 18607 - DNA, 20 bp, Artificial Sequence
  Chr19q_3 Forward Primer
tgctctaccaggtcaactgc

SEQ ID NO: 18608 - DNA, 20 bp, Artificial Sequence
  Chr19q_3 Forward Primer
ttctgctgtcctttgaccct

SEQ ID NO: 18609 - DNA, 19 bp, Artificial Sequence
  Chr19q_3 Forward Primer
cctgctgtcctcacctgaa

SEQ ID NO: 18610 - DNA, 20 bp, Artificial Sequence
  Chr19q_3 Forward Primer
ctggggtctcatgcaagaat

SEQ ID NO: 18611 - DNA, 21 bp, Artificial Sequence
  Chr19q_3 Forward Primer
gcttagcacagactcacttcg

SEQ ID NO: 18612 - DNA, 20 bp, Artificial Sequence
  Chr19q_3 Forward Primer
ggatttggggtaagggattg

SEQ ID NO: 18613 - DNA, 20 bp, Artificial Sequence
  Chr19q_3 Forward Primer
tctggatgggtgtgagtgag

SEQ ID NO: 18614 - DNA, 20 bp, Artificial Sequence
  Chr19q_3 Forward Primer
aagtggtgtaccaactgccc

SEQ ID NO: 18615 - DNA, 20 bp, Artificial Sequence
  Chr19q_3 Forward Primer
tctctgctgaatgtgtcccc

SEQ ID NO: 18616 - DNA, 20 bp, Artificial Sequence
  Chr19q_3 Forward Primer
tcttccaccatctcctccac

SEQ ID NO: 18617 - DNA, 20 bp, Artificial Sequence
  Chr19q_3 Forward Primer
aaccttttctgcttccctcc

SEQ ID NO: 18618 - DNA, 20 bp, Artificial Sequence
  Chr19q_3 Forward Primer
gtcaacacacatggcctcag

SEQ ID NO: 18619 - DNA, 20 bp, Artificial Sequence
  Chr19q_3 Forward Primer
cctaggcaggcatgtgtgta

SEQ ID NO: 18620 - DNA, 20 bp, Artificial Sequence
  Chr19q_3 Forward Primer
gtggaaattcgagaccagga

SEQ ID NO: 18621 - DNA, 20 bp, Artificial Sequence
  Chr19q_3 Forward Primer
tcccctagggaggttgtacc

SEQ ID NO: 18622 - DNA, 20 bp, Artificial Sequence
  Chr19q_3 Forward Primer
cccctgtgattttggtctgt

SEQ ID NO: 18623 - DNA, 20 bp, Artificial Sequence
  Chr19q_3 Forward Primer
gagcaccttctttctgctgg

SEQ ID NO: 18624 - DNA, 20 bp, Artificial Sequence
  Chr19q_3 Forward Primer
tttagatctggaagcccagc

SEQ ID NO: 18625 - DNA, 20 bp, Artificial Sequence
  Chr19q_3 Forward Primer
aacgcttgagagggaaaaca

SEQ ID NO: 18626 - DNA, 20 bp, Artificial Sequence
  Chr19q_3 Forward Primer
tgtgctcaggcaactcagtg

SEQ ID NO: 18627 - DNA, 20 bp, Artificial Sequence
  Chr19q_3 Forward Primer
aggtggtacagaggtccagg

SEQ ID NO: 18628 - DNA, 19 bp, Artificial Sequence
  Chr19q_3 Forward Primer
acagtgaatgcgctggtgt

SEQ ID NO: 18629 - DNA, 20 bp, Artificial Sequence
  Chr19q_3 Forward Primer
acgtggaggaggatttgaga

SEQ ID NO: 18630 - DNA, 20 bp, Artificial Sequence
  Chr19q_3 Forward Primer
ctctttagtcctccaccccc

SEQ ID NO: 18631 - DNA, 20 bp, Artificial Sequence
  Chr19q_3 Forward Primer
tgctacaagtaccaggtgcg

SEQ ID NO: 18632 - DNA, 20 bp, Artificial Sequence
  Chr19q_3 Forward Primer
cccagatcaggtggtcagtt

SEQ ID NO: 18633 - DNA, 20 bp, Artificial Sequence
  Chr19q_3 Forward Primer
gcctaggtgagaaggaggct

SEQ ID NO: 18634 - DNA, 20 bp, Artificial Sequence
  Chr19q_3 Forward Primer
tattcgtcactgctgcttgg

SEQ ID NO: 18635 - DNA, 21 bp, Artificial Sequence
  Chr19q_3 Forward Primer
tcctatgacaccttcgtggtc

SEQ ID NO: 18636 - DNA, 20 bp, Artificial Sequence
  Chr19q_3 Forward Primer
gctggtcatcacctacccac

SEQ ID NO: 18637 - DNA, 20 bp, Artificial Sequence
  Chr19q_3 Forward Primer
gcttcccacctgaccctact

SEQ ID NO: 18638 - DNA, 20 bp, Artificial Sequence
  Chr19q_3 Forward Primer
actgttgagccaggacaacc

SEQ ID NO: 18639 - DNA, 20 bp, Artificial Sequence
  Chr19q_3 Forward Primer
gtgggagcaggcttgtttta

SEQ ID NO: 18640 - DNA, 20 bp, Artificial Sequence
  Chr19q_3 Forward Primer
agacaaaaccacgatgaccc

SEQ ID NO: 18641 - DNA, 20 bp, Artificial Sequence
  Chr19q_3 Forward Primer
gcagggataaagctcagtgg

SEQ ID NO: 18642 - DNA, 20 bp, Artificial Sequence
  Chr19q_3 Forward Primer
ggactcctgtcctctacccc

SEQ ID NO: 18643 - DNA, 20 bp, Artificial Sequence
  Chr19q_3 Forward Primer
aagtatggggaaaacccagg

SEQ ID NO: 18644 - DNA, 20 bp, Artificial Sequence
  Chr19q_3 Forward Primer
gatttgctgccctgagagag

SEQ ID NO: 18645 - DNA, 22 bp, Artificial Sequence
  Chr19q_3 Forward Primer
caagtgctctatggtacgtgtt

SEQ ID NO: 18646 - DNA, 20 bp, Artificial Sequence
  Chr19q_3 Forward Primer
gggtgcttggtgtgaatctt

SEQ ID NO: 18647 - DNA, 20 bp, Artificial Sequence
  Chr19q_3 Forward Primer
tttgttagggtgagggcaac

SEQ ID NO: 18648 - DNA, 20 bp, Artificial Sequence
  Chr19q_3 Forward Primer
taggagagagcggtcaggag

SEQ ID NO: 18649 - DNA, 20 bp, Artificial Sequence
  Chr19q_3 Forward Primer
atcctaaggagtgttggggg

SEQ ID NO: 18650 - DNA, 20 bp, Artificial Sequence
  Chr19q_3 Forward Primer
gtctggtagcagctggtggt

SEQ ID NO: 18651 - DNA, 20 bp, Artificial Sequence
  Chr19q_3 Forward Primer
agtctgtccctgttgctgct

SEQ ID NO: 18652 - DNA, 20 bp, Artificial Sequence
  Chr19q_3 Forward Primer
gaaggacagagatgtcccga

SEQ ID NO: 18653 - DNA, 20 bp, Artificial Sequence
  Chr19q_3 Forward Primer
cacttctcctcctgcctcag

SEQ ID NO: 18654 - DNA, 20 bp, Artificial Sequence
  Chr19q_3 Forward Primer
gactcagtgagggaagcagc

SEQ ID NO: 18655 - DNA, 20 bp, Artificial Sequence
  Chr19q_3 Forward Primer
ctagagcctggatgtctggg

SEQ ID NO: 18656 - DNA, 20 bp, Artificial Sequence
  Chr19q_3 Forward Primer
tcctcaacctgctgtttcct

SEQ ID NO: 18657 - DNA, 20 bp, Artificial Sequence
  Chr19q_3 Forward Primer
cgtgtttggtgtgatcttgc

SEQ ID NO: 18658 - DNA, 20 bp, Artificial Sequence
  Chr19q_3 Forward Primer
gaaaaacgatggctggattg

SEQ ID NO: 18659 - DNA, 20 bp, Artificial Sequence
  Chr19q_3 Forward Primer
gagtgaccgagatgcagtga

SEQ ID NO: 18660 - DNA, 19 bp, Artificial Sequence
  Chr19q_3 Forward Primer
ccatccttggacctgcttt

SEQ ID NO: 18661 - DNA, 20 bp, Artificial Sequence
  Chr19q_3 Forward Primer
aaatgctcagcacagaacca

SEQ ID NO: 18662 - DNA, 20 bp, Artificial Sequence
  Chr19q_3 Forward Primer
ctaggtatgtggggccagaa

SEQ ID NO: 18663 - DNA, 20 bp, Artificial Sequence
  Chr19q_3 Forward Primer
gtggaaaaccgtgaggctta

SEQ ID NO: 18664 - DNA, 21 bp, Artificial Sequence
  Chr19q_3 Forward Primer
tcgtctagccactcactcaca

SEQ ID NO: 18665 - DNA, 20 bp, Artificial Sequence
  Chr19q_3 Forward Primer
tcttggaggagcagaaggtg

SEQ ID NO: 18666 - DNA, 20 bp, Artificial Sequence
  Chr19q_3 Forward Primer
ggtagtggagagccatggaa

SEQ ID NO: 18667 - DNA, 19 bp, Artificial Sequence
  Chr19q_3 Forward Primer
gatgggctatgggacaagg

SEQ ID NO: 18668 - DNA, 20 bp, Artificial Sequence
  Chr19q_3 Forward Primer
gtgaacgaggacctctgagc

SEQ ID NO: 18669 - DNA, 20 bp, Artificial Sequence
  Chr19q_3 Forward Primer
ggtcactgaggtcacctgct

SEQ ID NO: 18670 - DNA, 20 bp, Artificial Sequence
  Chr19q_3 Forward Primer
ctgagaccttccagctcacc

SEQ ID NO: 18671 - DNA, 20 bp, Artificial Sequence
  Chr19q_3 Forward Primer
tttgcccttttctgtccatc

SEQ ID NO: 18672 - DNA, 20 bp, Artificial Sequence
  Chr19q_3 Forward Primer
aggtggcagctttgatcact

SEQ ID NO: 18673 - DNA, 20 bp, Artificial Sequence
  Chr19q_3 Forward Primer
tcactggagcctttgagacc

SEQ ID NO: 18674 - DNA, 20 bp, Artificial Sequence
  Chr19q_3 Forward Primer
acaacaaaccaaaccgacct

SEQ ID NO: 18675 - DNA, 19 bp, Artificial Sequence
  Chr19q_3 Forward Primer
gaaggcattcatgacggag

SEQ ID NO: 18676 - DNA, 20 bp, Artificial Sequence
  Chr19q_3 Forward Primer
gcgggaaatacggatacaga

SEQ ID NO: 18677 - DNA, 20 bp, Artificial Sequence
  Chr19q_3 Reverse Primer
ctccccacaactccagtcat

SEQ ID NO: 18678 - DNA, 20 bp, Artificial Sequence
  Chr19q_3 Reverse Primer
agttgggcagaggagtcaga

SEQ ID NO: 18679 - DNA, 20 bp, Artificial Sequence
  Chr19q_3 Reverse Primer
agcaaacaggaagcaggtgt

SEQ ID NO: 18680 - DNA, 20 bp, Artificial Sequence
  Chr19q_3 Reverse Primer
gtacggaaaagggaaggtgg

SEQ ID NO: 18681 - DNA, 20 bp, Artificial Sequence
  Chr19q_3 Reverse Primer
cagggtgggagagtgaagaa

SEQ ID NO: 18682 - DNA, 20 bp, Artificial Sequence
  Chr19q_3 Reverse Primer
ctggggaccctgtcactcta

SEQ ID NO: 18683 - DNA, 20 bp, Artificial Sequence
  Chr19q_3 Reverse Primer
taaagcaccccatcatctcc

SEQ ID NO: 18684 - DNA, 20 bp, Artificial Sequence
  Chr19q_3 Reverse Primer
agaagagcaaactggagccc

SEQ ID NO: 18685 - DNA, 20 bp, Artificial Sequence
  Chr19q_3 Reverse Primer
tcaagtcaagggtggaaaca

SEQ ID NO: 18686 - DNA, 20 bp, Artificial Sequence
  Chr19q_3 Reverse Primer
cataatagcctggggagcag

SEQ ID NO: 18687 - DNA, 20 bp, Artificial Sequence
  Chr19q_3 Reverse Primer
agggctgtagctcctcagtg

SEQ ID NO: 18688 - DNA, 20 bp, Artificial Sequence
  Chr19q_3 Reverse Primer
tgggagctgaggaaatagga

SEQ ID NO: 18689 - DNA, 20 bp, Artificial Sequence
  Chr19q_3 Reverse Primer
gggtgcagaatcgaggatta

SEQ ID NO: 18690 - DNA, 20 bp, Artificial Sequence
  Chr19q_3 Reverse Primer
gtcctgagcccacttcaggt

SEQ ID NO: 18691 - DNA, 20 bp, Artificial Sequence
  Chr19q_3 Reverse Primer
aggatgaaccattctgcacc

SEQ ID NO: 18692 - DNA, 20 bp, Artificial Sequence
  Chr19q_3 Reverse Primer
ctggttacaagttcctgccc

SEQ ID NO: 18693 - DNA, 20 bp, Artificial Sequence
  Chr19q_3 Reverse Primer
aggaatggaggtgggagaac

SEQ ID NO: 18694 - DNA, 20 bp, Artificial Sequence
  Chr19q_3 Reverse Primer
tcttatttgcgaatcccacc

SEQ ID NO: 18695 - DNA, 20 bp, Artificial Sequence
  Chr19q_3 Reverse Primer
acagtcatcccagcatcctt

SEQ ID NO: 18696 - DNA, 20 bp, Artificial Sequence
  Chr19q_3 Reverse Primer
tcaagtttggggcttctgtt

SEQ ID NO: 18697 - DNA, 20 bp, Artificial Sequence
  Chr19q_3 Reverse Primer
gggtcaccttgtgggtagaa

SEQ ID NO: 18698 - DNA, 20 bp, Artificial Sequence
  Chr19q_3 Reverse Primer
tcgaggaagaacccttgaga

SEQ ID NO: 18699 - DNA, 20 bp, Artificial Sequence
  Chr19q_3 Reverse Primer
acacgtagagggagtcggtg

SEQ ID NO: 18700 - DNA, 20 bp, Artificial Sequence
  Chr19q_3 Reverse Primer
acacattctccttggccttg

SEQ ID NO: 18701 - DNA, 20 bp, Artificial Sequence
  Chr19q_3 Reverse Primer
ccacagagccatcttcttcc

SEQ ID NO: 18702 - DNA, 19 bp, Artificial Sequence
  Chr19q_3 Reverse Primer
tgctgaactcgtcagggtc

SEQ ID NO: 18703 - DNA, 20 bp, Artificial Sequence
  Chr19q_3 Reverse Primer
aaaaaggaaggagggcatgt

SEQ ID NO: 18704 - DNA, 20 bp, Artificial Sequence
  Chr19q_3 Reverse Primer
gagatatacaggcggctccc

SEQ ID NO: 18705 - DNA, 20 bp, Artificial Sequence
  Chr19q_3 Reverse Primer
gtgattcacccctttcctga

SEQ ID NO: 18706 - DNA, 20 bp, Artificial Sequence
  Chr19q_3 Reverse Primer
atgtctgcattcctggaacc

SEQ ID NO: 18707 - DNA, 22 bp, Artificial Sequence
  Chr19q_3 Reverse Primer
cacgtttcagactgttctggat

SEQ ID NO: 18708 - DNA, 20 bp, Artificial Sequence
  Chr19q_3 Reverse Primer
ttctgcctcctggatttctc

SEQ ID NO: 18709 - DNA, 20 bp, Artificial Sequence
  Chr19q_3 Reverse Primer
ccctacacctgctgcttctc

SEQ ID NO: 18710 - DNA, 20 bp, Artificial Sequence
  Chr19q_3 Reverse Primer
gaactaggcccactgctcac

SEQ ID NO: 18711 - DNA, 20 bp, Artificial Sequence
  Chr19q_3 Reverse Primer
gcagagaggagggagacctg

SEQ ID NO: 18712 - DNA, 20 bp, Artificial Sequence
  Chr19q_3 Reverse Primer
tggaaaggatgaggagacca

SEQ ID NO: 18713 - DNA, 20 bp, Artificial Sequence
  Chr19q_3 Reverse Primer
aacccgacaatggagaagtg

SEQ ID NO: 18714 - DNA, 20 bp, Artificial Sequence
  Chr19q_3 Reverse Primer
gaggcctagatctgacgtgc

SEQ ID NO: 18715 - DNA, 20 bp, Artificial Sequence
  Chr19q_3 Reverse Primer
gctgagtgacattgcttcca

SEQ ID NO: 18716 - DNA, 20 bp, Artificial Sequence
  Chr19q_3 Reverse Primer
ggggaagtcactcatccaaa

SEQ ID NO: 18717 - DNA, 20 bp, Artificial Sequence
  Chr19q_3 Reverse Primer
tggtgtgtcccatacagtgg

SEQ ID NO: 18718 - DNA, 20 bp, Artificial Sequence
  Chr19q_3 Reverse Primer
ttcaggcgtgtgagaacttg

SEQ ID NO: 18719 - DNA, 20 bp, Artificial Sequence
  Chr19q_3 Reverse Primer
ggaggggtagagaaccctga

SEQ ID NO: 18720 - DNA, 20 bp, Artificial Sequence
  Chr19q_3 Reverse Primer
gcttgggccataagtgaaga

SEQ ID NO: 18721 - DNA, 19 bp, Artificial Sequence
  Chr19q_3 Reverse Primer
gcaggtaggaagggctcag

SEQ ID NO: 18722 - DNA, 20 bp, Artificial Sequence
  Chr19q_3 Reverse Primer
tctggcccagtatccctatg

SEQ ID NO: 18723 - DNA, 20 bp, Artificial Sequence
  Chr19q_3 Reverse Primer
ttgtccatggtatagccggt

SEQ ID NO: 18724 - DNA, 20 bp, Artificial Sequence
  Chr19q_3 Reverse Primer
ccccaagtctccacacatct

SEQ ID NO: 18725 - DNA, 20 bp, Artificial Sequence
  Chr19q_3 Reverse Primer
gaggctggagagtcatcagg

SEQ ID NO: 18726 - DNA, 20 bp, Artificial Sequence
  Chr19q_3 Reverse Primer
gaaggagatggaaaggggag

SEQ ID NO: 18727 - DNA, 20 bp, Artificial Sequence
  Chr19q_3 Reverse Primer
aggctcatatcttggtcccc

SEQ ID NO: 18728 - DNA, 20 bp, Artificial Sequence
  Chr19q_3 Reverse Primer
acatttgcctgctttgttcc

SEQ ID NO: 18729 - DNA, 20 bp, Artificial Sequence
  Chr19q_3 Reverse Primer
agatcatgtgcatggcactc

SEQ ID NO: 18730 - DNA, 20 bp, Artificial Sequence
  Chr19q_3 Reverse Primer
tcatggaagcagttggtctg

SEQ ID NO: 18731 - DNA, 20 bp, Artificial Sequence
  Chr19q_3 Reverse Primer
tcacgtaggtaatcaggccc

SEQ ID NO: 18732 - DNA, 21 bp, Artificial Sequence
  Chr19q_3 Reverse Primer
ggaagaggaagaagcaggaga

SEQ ID NO: 18733 - DNA, 20 bp, Artificial Sequence
  Chr19q_3 Reverse Primer
tcttctgtgggctcgagagt

SEQ ID NO: 18734 - DNA, 20 bp, Artificial Sequence
  Chr19q_3 Reverse Primer
tgctgaatgcagaacaaagg

SEQ ID NO: 18735 - DNA, 20 bp, Artificial Sequence
  Chr19q_3 Reverse Primer
acatcggatcctgtcactcc

SEQ ID NO: 18736 - DNA, 20 bp, Artificial Sequence
  Chr19q_3 Reverse Primer
ccccattcaatttctgctgt

SEQ ID NO: 18737 - DNA, 20 bp, Artificial Sequence
  Chr19q_3 Reverse Primer
aatcttccaggcagcactgt

SEQ ID NO: 18738 - DNA, 20 bp, Artificial Sequence
  Chr19q_3 Reverse Primer
cccctcttcttctgatgtgg

SEQ ID NO: 18739 - DNA, 20 bp, Artificial Sequence
  Chr19q_3 Reverse Primer
atgcttctgttggggcatac

SEQ ID NO: 18740 - DNA, 20 bp, Artificial Sequence
  Chr19q_3 Reverse Primer
ggctatgcatcccagagaaa

SEQ ID NO: 18741 - DNA, 20 bp, Artificial Sequence
  Chr19q_3 Reverse Primer
ggctgtaggccctcagtaaa

SEQ ID NO: 18742 - DNA, 20 bp, Artificial Sequence
  Chr19q_3 Reverse Primer
gcccattctaggcaatcaga

SEQ ID NO: 18743 - DNA, 20 bp, Artificial Sequence
  Chr19q_3 Reverse Primer
tgccagaaatacacccacaa

SEQ ID NO: 18744 - DNA, 20 bp, Artificial Sequence
  Chr19q_3 Reverse Primer
cttttgctcctctgtgcctt

SEQ ID NO: 18745 - DNA, 20 bp, Artificial Sequence
  Chr19q_3 Reverse Primer
acgacatgcctgtctgtgag

SEQ ID NO: 18746 - DNA, 20 bp, Artificial Sequence
  Chr19q_3 Reverse Primer
atgtagcagaagggaagggg

SEQ ID NO: 18747 - DNA, 20 bp, Artificial Sequence
  Chr19q_3 Reverse Primer
cttgcttcgaagacagacgg

SEQ ID NO: 18748 - DNA, 20 bp, Artificial Sequence
  Chr19q_3 Reverse Primer
gagacggagaagtcagtgcc

SEQ ID NO: 18749 - DNA, 20 bp, Artificial Sequence
  Chr19q_3 Reverse Primer
cctgcgtctctccatctctc

SEQ ID NO: 18750 - DNA, 20 bp, Artificial Sequence
  Chr19q_3 Reverse Primer
taatgtgttggagggaggga

SEQ ID NO: 18751 - DNA, 20 bp, Artificial Sequence
  Chr19q_3 Reverse Primer
gagacacagagcctggaagg

SEQ ID NO: 18752 - DNA, 20 bp, Artificial Sequence
  Chr19q_3 Reverse Primer
accctctcatatcacaccgc

SEQ ID NO: 18753 - DNA, 20 bp, Artificial Sequence
  Chr19q_3 Reverse Primer
cctgtttctccttgagccac

SEQ ID NO: 18754 - DNA, 19 bp, Artificial Sequence
  Chr19q_3 Reverse Primer
gtcactgaggcccattgtg

SEQ ID NO: 18755 - DNA, 20 bp, Artificial Sequence
  Chr19q_3 Reverse Primer
agcttgtccaacccttctga

SEQ ID NO: 18756 - DNA, 20 bp, Artificial Sequence
  Chr19q_3 Reverse Primer
ggcctagtgagggagaatcc

SEQ ID NO: 18757 - DNA, 20 bp, Artificial Sequence
  Chr19q_3 Reverse Primer
ctggatatgccctttcctca

SEQ ID NO: 18758 - DNA, 19 bp, Artificial Sequence
  Chr19q_3 Reverse Primer
aggcaaagggtcctgagtg

SEQ ID NO: 18759 - DNA, 20 bp, Artificial Sequence
  Chr19q_3 Reverse Primer
gtgagagaattgagggcagg

SEQ ID NO: 18760 - DNA, 20 bp, Artificial Sequence
  Chr19q_3 Reverse Primer
aaaagtctctcctgggctcc

SEQ ID NO: 18761 - DNA, 20 bp, Artificial Sequence
  Chr19q_3 Reverse Primer
ctggcctctgctcatctctt

SEQ ID NO: 18762 - DNA, 20 bp, Artificial Sequence
  Chr19q_3 Reverse Primer
ttacagacacgagccacagc

SEQ ID NO: 18763 - DNA, 20 bp, Artificial Sequence
  Chr19q_3 Reverse Primer
tcctgaaggtccagatccac

SEQ ID NO: 18764 - DNA, 20 bp, Artificial Sequence
  Chr19q_3 Reverse Primer
gcagccagacatagtgggtt

SEQ ID NO: 18765 - DNA, 20 bp, Artificial Sequence
  Chr19q_3 Reverse Primer
agagacagccctgaggatca

SEQ ID NO: 18766 - DNA, 20 bp, Artificial Sequence
  Chr19q_3 Reverse Primer
cagagccataaaaggtggga

SEQ ID NO: 18767 - DNA, 20 bp, Artificial Sequence
  Chr19q_3 Reverse Primer
gaaggtcaggtgcaaagtgg

SEQ ID NO: 18768 - DNA, 20 bp, Artificial Sequence
  Chr19q_3 Reverse Primer
tcaaagggcttctgatcctg

SEQ ID NO: 18769 - DNA, 20 bp, Artificial Sequence
  Chr19q_3 Reverse Primer
aagggagtggactccttggt

SEQ ID NO: 18770 - DNA, 20 bp, Artificial Sequence
  Chr19q_3 Reverse Primer
gccttacttaagtcgggggt

SEQ ID NO: 18771 - DNA, 18 bp, Artificial Sequence
  Chr19q_3 Reverse Primer
cacggcttcctgacccta

SEQ ID NO: 18772 - DNA, 20 bp, Artificial Sequence
  Chr19q_3 Reverse Primer
cttgggcttggagaatcaag

SEQ ID NO: 18773 - DNA, 20 bp, Artificial Sequence
  Chr19q_4 Forward Primer
ggcagtacaaacaggacggt

SEQ ID NO: 18774 - DNA, 20 bp, Artificial Sequence
  Chr19q_4 Forward Primer
gccagtgaagcacagatgaa

SEQ ID NO: 18775 - DNA, 20 bp, Artificial Sequence
  Chr19q_4 Forward Primer
gaagttaccgggaagaaggg

SEQ ID NO: 18776 - DNA, 20 bp, Artificial Sequence
  Chr19q_4 Forward Primer
gctactgaatgccttccctg

SEQ ID NO: 18777 - DNA, 20 bp, Artificial Sequence
  Chr19q_4 Forward Primer
cacgtggctcagtttgttca

SEQ ID NO: 18778 - DNA, 20 bp, Artificial Sequence
  Chr19q_4 Forward Primer
tgcaagttcatcaggactgc

SEQ ID NO: 18779 - DNA, 20 bp, Artificial Sequence
  Chr19q_4 Forward Primer
aatgttcactcccgttttgc

SEQ ID NO: 18780 - DNA, 20 bp, Artificial Sequence
  Chr19q_4 Forward Primer
ataaagccacagtgcctgct

SEQ ID NO: 18781 - DNA, 20 bp, Artificial Sequence
  Chr19q_4 Forward Primer
gccacgctctcagaataggt

SEQ ID NO: 18782 - DNA, 25 bp, Artificial Sequence
  Chr19q_4 Forward Primer
cagctttccacttagatcattagga

SEQ ID NO: 18783 - DNA, 20 bp, Artificial Sequence
  Chr19q_4 Forward Primer
tacctttccacagaggtcgg

SEQ ID NO: 18784 - DNA, 20 bp, Artificial Sequence
  Chr19q_4 Forward Primer
gagtcctggtgtgaaggagc

SEQ ID NO: 18785 - DNA, 20 bp, Artificial Sequence
  Chr19q_4 Forward Primer
tctgctgcatgctcactctt

SEQ ID NO: 18786 - DNA, 20 bp, Artificial Sequence
  Chr19q_4 Forward Primer
cccctagaaccattggaaca

SEQ ID NO: 18787 - DNA, 20 bp, Artificial Sequence
  Chr19q_4 Forward Primer
cttgggagcctgcagtagac

SEQ ID NO: 18788 - DNA, 20 bp, Artificial Sequence
  Chr19q_4 Forward Primer
tctttccagcgtcctgtttc

SEQ ID NO: 18789 - DNA, 20 bp, Artificial Sequence
  Chr19q_4 Forward Primer
aattgatgctctggtacggc

SEQ ID NO: 18790 - DNA, 20 bp, Artificial Sequence
  Chr19q_4 Forward Primer
gctcggagactgcctctcta

SEQ ID NO: 18791 - DNA, 20 bp, Artificial Sequence
  Chr19q_4 Forward Primer
ctagtgctggtgagcagggt

SEQ ID NO: 18792 - DNA, 20 bp, Artificial Sequence
  Chr19q_4 Forward Primer
cagcgtgtgaccactctgat

SEQ ID NO: 18793 - DNA, 20 bp, Artificial Sequence
  Chr19q_4 Forward Primer
tcggcactgtttctgttgtc

SEQ ID NO: 18794 - DNA, 20 bp, Artificial Sequence
  Chr19q_4 Forward Primer
agcccatccttcccttgata

SEQ ID NO: 18795 - DNA, 27 bp, Artificial Sequence
  Chr19q_4 Forward Primer
caacaaattcagtaaacaaaattagaa

SEQ ID NO: 18796 - DNA, 24 bp, Artificial Sequence
  Chr19q_4 Forward Primer
tgaacagaagttatctttagctgc

SEQ ID NO: 18797 - DNA, 20 bp, Artificial Sequence
  Chr19q_4 Forward Primer
ctgctctccagttcctgctc

SEQ ID NO: 18798 - DNA, 20 bp, Artificial Sequence
  Chr19q_4 Forward Primer
cactgccactcacagatgct

SEQ ID NO: 18799 - DNA, 20 bp, Artificial Sequence
  Chr19q_4 Forward Primer
agaagcaaaagcaccagagc

SEQ ID NO: 18800 - DNA, 20 bp, Artificial Sequence
  Chr19q_4 Forward Primer
tcatcaggaacgcactgaag

SEQ ID NO: 18801 - DNA, 20 bp, Artificial Sequence
  Chr19q_4 Forward Primer
tggtagaaggggcagttcag

SEQ ID NO: 18802 - DNA, 20 bp, Artificial Sequence
  Chr19q_4 Forward Primer
cctggtcccgtataacatgc

SEQ ID NO: 18803 - DNA, 20 bp, Artificial Sequence
  Chr19q_4 Forward Primer
ttgtggccgacttaaccttc

SEQ ID NO: 18804 - DNA, 20 bp, Artificial Sequence
  Chr19q_4 Forward Primer
gcctctggagggaaagagat

SEQ ID NO: 18805 - DNA, 20 bp, Artificial Sequence
  Chr19q_4 Forward Primer
gctgcagaagggagtgtctc

SEQ ID NO: 18806 - DNA, 20 bp, Artificial Sequence
  Chr19q_4 Forward Primer
ctccaagctcatccttccag

SEQ ID NO: 18807 - DNA, 20 bp, Artificial Sequence
  Chr19q_4 Forward Primer
ttctttccacggaagcttgt

SEQ ID NO: 18808 - DNA, 20 bp, Artificial Sequence
  Chr19q_4 Forward Primer
ttgatagggaatcagccacc

SEQ ID NO: 18809 - DNA, 20 bp, Artificial Sequence
  Chr19q_4 Forward Primer
ttcaactgagccgcagatac

SEQ ID NO: 18810 - DNA, 20 bp, Artificial Sequence
  Chr19q_4 Forward Primer
gaaatgaacagcagcagcaa

SEQ ID NO: 18811 - DNA, 20 bp, Artificial Sequence
  Chr19q_4 Forward Primer
agcttgaagtgcacaaaccc

SEQ ID NO: 18812 - DNA, 20 bp, Artificial Sequence
  Chr19q_4 Forward Primer
gtctcaagccagagggtcag

SEQ ID NO: 18813 - DNA, 20 bp, Artificial Sequence
  Chr19q_4 Forward Primer
atctgtccacatagctgccc

SEQ ID NO: 18814 - DNA, 20 bp, Artificial Sequence
  Chr19q_4 Forward Primer
agagtgaggtcttggccttg

SEQ ID NO: 18815 - DNA, 20 bp, Artificial Sequence
  Chr19q_4 Forward Primer
tgttctttgggaacagggtc

SEQ ID NO: 18816 - DNA, 20 bp, Artificial Sequence
  Chr19q_4 Forward Primer
ttgttgtctcagtcgatggc

SEQ ID NO: 18817 - DNA, 20 bp, Artificial Sequence
  Chr19q_4 Forward Primer
gggtggaggttacaccaaaa

SEQ ID NO: 18818 - DNA, 20 bp, Artificial Sequence
  Chr19q_4 Forward Primer
gggtagaaggtgtccagggt

SEQ ID NO: 18819 - DNA, 20 bp, Artificial Sequence
  Chr19q_4 Forward Primer
gtcctttcccctctttccac

SEQ ID NO: 18820 - DNA, 20 bp, Artificial Sequence
  Chr19q_4 Forward Primer
tgtcaccacacaacctcacc

SEQ ID NO: 18821 - DNA, 20 bp, Artificial Sequence
  Chr19q_4 Forward Primer
ttctcttggcctctggagtg

SEQ ID NO: 18822 - DNA, 20 bp, Artificial Sequence
  Chr19q_4 Forward Primer
accttgcttttagtgtgggc

SEQ ID NO: 18823 - DNA, 20 bp, Artificial Sequence
  Chr19q_4 Forward Primer
agacctgtgtcctcctgtgc

SEQ ID NO: 18824 - DNA, 20 bp, Artificial Sequence
  Chr19q_4 Forward Primer
cacactctcaaggccacaga

SEQ ID NO: 18825 - DNA, 20 bp, Artificial Sequence
  Chr19q_4 Forward Primer
atttgtaccagggccatctg

SEQ ID NO: 18826 - DNA, 20 bp, Artificial Sequence
  Chr19q_4 Forward Primer
gattcatcagcagaatggca

SEQ ID NO: 18827 - DNA, 18 bp, Artificial Sequence
  Chr19q_4 Forward Primer
tctgggacgtttgtgcct

SEQ ID NO: 18828 - DNA, 20 bp, Artificial Sequence
  Chr19q_4 Forward Primer
gcattccaggcagttgtttt

SEQ ID NO: 18829 - DNA, 20 bp, Artificial Sequence
  Chr19q_4 Forward Primer
aatggtgttctttatggcgg

SEQ ID NO: 18830 - DNA, 18 bp, Artificial Sequence
  Chr19q_4 Forward Primer
aggcccatcacagagcac

SEQ ID NO: 18831 - DNA, 20 bp, Artificial Sequence
  Chr19q_4 Forward Primer
aaattgacagccagggtcag

SEQ ID NO: 18832 - DNA, 20 bp, Artificial Sequence
  Chr19q_4 Forward Primer
tctcacagcattcacgttcc

SEQ ID NO: 18833 - DNA, 20 bp, Artificial Sequence
  Chr19q_4 Forward Primer
cacctgagggaagaaaggtg

SEQ ID NO: 18834 - DNA, 20 bp, Artificial Sequence
  Chr19q_4 Forward Primer
gtccccttcctcacttccac

SEQ ID NO: 18835 - DNA, 20 bp, Artificial Sequence
  Chr19q_4 Forward Primer
ctcaagacctcagtgggagc

SEQ ID NO: 18836 - DNA, 20 bp, Artificial Sequence
  Chr19q_4 Forward Primer
acccccaaggtaagggtaca

SEQ ID NO: 18837 - DNA, 20 bp, Artificial Sequence
  Chr19q_4 Forward Primer
agctgaccctcgtctttgtg

SEQ ID NO: 18838 - DNA, 20 bp, Artificial Sequence
  Chr19q_4 Forward Primer
agtggaatcgtttcatccca

SEQ ID NO: 18839 - DNA, 20 bp, Artificial Sequence
  Chr19q_4 Forward Primer
gggctcgttgcactttaaga

SEQ ID NO: 18840 - DNA, 20 bp, Artificial Sequence
  Chr19q_4 Forward Primer
ggttcaggcgtgttttctgt

SEQ ID NO: 18841 - DNA, 20 bp, Artificial Sequence
  Chr19q_4 Forward Primer
cagctcctcacgtaattggg

SEQ ID NO: 18842 - DNA, 20 bp, Artificial Sequence
  Chr19q_4 Forward Primer
ctgggctctctacccctctc

SEQ ID NO: 18843 - DNA, 20 bp, Artificial Sequence
  Chr19q_4 Forward Primer
ttggggctctaagttctgga

SEQ ID NO: 18844 - DNA, 20 bp, Artificial Sequence
  Chr19q_4 Forward Primer
ttgtgtcgcatactgggtgt

SEQ ID NO: 18845 - DNA, 20 bp, Artificial Sequence
  Chr19q_4 Forward Primer
gccggctagaaaaagtaggg

SEQ ID NO: 18846 - DNA, 18 bp, Artificial Sequence
  Chr19q_4 Forward Primer
gtctgtcacctcggccac

SEQ ID NO: 18847 - DNA, 20 bp, Artificial Sequence
  Chr19q_4 Forward Primer
ctgtttcgcagcaaaagtga

SEQ ID NO: 18848 - DNA, 20 bp, Artificial Sequence
  Chr19q_4 Forward Primer
ttgtctcaatgggaatggtg

SEQ ID NO: 18849 - DNA, 20 bp, Artificial Sequence
  Chr19q_4 Forward Primer
tttcctctccagcacagctt

SEQ ID NO: 18850 - DNA, 20 bp, Artificial Sequence
  Chr19q_4 Forward Primer
ggtcacactcactccctggt

SEQ ID NO: 18851 - DNA, 20 bp, Artificial Sequence
  Chr19q_4 Forward Primer
tagacacccccacacactga

SEQ ID NO: 18852 - DNA, 20 bp, Artificial Sequence
  Chr19q_4 Forward Primer
atgccttatgcgtggtaagc

SEQ ID NO: 18853 - DNA, 20 bp, Artificial Sequence
  Chr19q_4 Forward Primer
tgtctcctcccgtaacatcc

SEQ ID NO: 18854 - DNA, 20 bp, Artificial Sequence
  Chr19q_4 Forward Primer
gattctgggagtccagcaag

SEQ ID NO: 18855 - DNA, 20 bp, Artificial Sequence
  Chr19q_4 Forward Primer
tccccactttcctgtgaaac

SEQ ID NO: 18856 - DNA, 20 bp, Artificial Sequence
  Chr19q_4 Forward Primer
agcaggggaatgagctactg

SEQ ID NO: 18857 - DNA, 20 bp, Artificial Sequence
  Chr19q_4 Forward Primer
aggccactatcaccaggcta

SEQ ID NO: 18858 - DNA, 20 bp, Artificial Sequence
  Chr19q_4 Forward Primer
tctaatggggagcttggatg

SEQ ID NO: 18859 - DNA, 20 bp, Artificial Sequence
  Chr19q_4 Forward Primer
ctggatttgtgtccctggag

SEQ ID NO: 18860 - DNA, 18 bp, Artificial Sequence
  Chr19q_4 Forward Primer
gtagcttggccccctacc

SEQ ID NO: 18861 - DNA, 20 bp, Artificial Sequence
  Chr19q_4 Forward Primer
gtcctggagaaatctggggt

SEQ ID NO: 18862 - DNA, 19 bp, Artificial Sequence
  Chr19q_4 Forward Primer
gggaaaacagggtgcagat

SEQ ID NO: 18863 - DNA, 20 bp, Artificial Sequence
  Chr19q_4 Forward Primer
ctgcacggatctcagtttcc

SEQ ID NO: 18864 - DNA, 20 bp, Artificial Sequence
  Chr19q_4 Forward Primer
ttcacacccgatgttctgtc

SEQ ID NO: 18865 - DNA, 19 bp, Artificial Sequence
  Chr19q_4 Forward Primer
gaatccactcccaacgtcc

SEQ ID NO: 18866 - DNA, 19 bp, Artificial Sequence
  Chr19q_4 Forward Primer
gcctcagcgtcacctacct

SEQ ID NO: 18867 - DNA, 20 bp, Artificial Sequence
  Chr19q_4 Forward Primer
ccctggcagttctagtggtc

SEQ ID NO: 18868 - DNA, 20 bp, Artificial Sequence
  Chr19q_4 Forward Primer
ggatgagatggggaacttca

SEQ ID NO: 18869 - DNA, 20 bp, Artificial Sequence
  Chr19q_4 Reverse Primer
agaaggtgtgcgtgtgagtg

SEQ ID NO: 18870 - DNA, 20 bp, Artificial Sequence
  Chr19q_4 Reverse Primer
acttttacagggcagagcca

SEQ ID NO: 18871 - DNA, 20 bp, Artificial Sequence
  Chr19q_4 Reverse Primer
gaggaagaaaagtgcagcgt

SEQ ID NO: 18872 - DNA, 20 bp, Artificial Sequence
  Chr19q_4 Reverse Primer
tcaccacaaggcactgtctc

SEQ ID NO: 18873 - DNA, 21 bp, Artificial Sequence
  Chr19q_4 Reverse Primer
aggtctcccctgactcctaga

SEQ ID NO: 18874 - DNA, 20 bp, Artificial Sequence
  Chr19q_4 Reverse Primer
cttcctttcctggcctctct

SEQ ID NO: 18875 - DNA, 20 bp, Artificial Sequence
  Chr19q_4 Reverse Primer
ggacttctggacctgctctg

SEQ ID NO: 18876 - DNA, 20 bp, Artificial Sequence
  Chr19q_4 Reverse Primer
gtggttttctggctgctctc

SEQ ID NO: 18877 - DNA, 20 bp, Artificial Sequence
  Chr19q_4 Reverse Primer
gcacctgagttctgctgtca

SEQ ID NO: 18878 - DNA, 19 bp, Artificial Sequence
  Chr19q_4 Reverse Primer
cactcccccaatctcacct

SEQ ID NO: 18879 - DNA, 20 bp, Artificial Sequence
  Chr19q_4 Reverse Primer
catgccaggcaggacttaac

SEQ ID NO: 18880 - DNA, 20 bp, Artificial Sequence
  Chr19q_4 Reverse Primer
ggcaggacggacactaaaaa

SEQ ID NO: 18881 - DNA, 20 bp, Artificial Sequence
  Chr19q_4 Reverse Primer
acggtgctaagtgctttcgt

SEQ ID NO: 18882 - DNA, 20 bp, Artificial Sequence
  Chr19q_4 Reverse Primer
aagacccatgtcaccaaagc

SEQ ID NO: 18883 - DNA, 20 bp, Artificial Sequence
  Chr19q_4 Reverse Primer
gagaccacagcaggaaaagg

SEQ ID NO: 18884 - DNA, 20 bp, Artificial Sequence
  Chr19q_4 Reverse Primer
aaatagcaaccctgctgctg

SEQ ID NO: 18885 - DNA, 20 bp, Artificial Sequence
  Chr19q_4 Reverse Primer
atcaccttctggtgaccctg

SEQ ID NO: 18886 - DNA, 20 bp, Artificial Sequence
  Chr19q_4 Reverse Primer
atgagcaagccttgggtatg

SEQ ID NO: 18887 - DNA, 20 bp, Artificial Sequence
  Chr19q_4 Reverse Primer
ccactgtcctgcctccttag

SEQ ID NO: 18888 - DNA, 20 bp, Artificial Sequence
  Chr19q_4 Reverse Primer
ggcttcaagaacactggagc

SEQ ID NO: 18889 - DNA, 20 bp, Artificial Sequence
  Chr19q_4 Reverse Primer
ctgggaacgaagtccactgt

SEQ ID NO: 18890 - DNA, 23 bp, Artificial Sequence
  Chr19q_4 Reverse Primer
tgtcttccttggtttttatgctt

SEQ ID NO: 18891 - DNA, 27 bp, Artificial Sequence
  Chr19q_4 Reverse Primer
tttgacaactagtaaaagcttaacaga

SEQ ID NO: 18892 - DNA, 20 bp, Artificial Sequence
  Chr19q_4 Reverse Primer
tcgaagacaaggagaaagcc

SEQ ID NO: 18893 - DNA, 20 bp, Artificial Sequence
  Chr19q_4 Reverse Primer
aagccccacagacagttcac

SEQ ID NO: 18894 - DNA, 20 bp, Artificial Sequence
  Chr19q_4 Reverse Primer
tggtccctcactttctctgg

SEQ ID NO: 18895 - DNA, 20 bp, Artificial Sequence
  Chr19q_4 Reverse Primer
cctcgtgtctcccacagatt

SEQ ID NO: 18896 - DNA, 20 bp, Artificial Sequence
  Chr19q_4 Reverse Primer
gctttcctaaagggtggctc

SEQ ID NO: 18897 - DNA, 20 bp, Artificial Sequence
  Chr19q_4 Reverse Primer
agtcaggagagtgaggccaa

SEQ ID NO: 18898 - DNA, 20 bp, Artificial Sequence
  Chr19q_4 Reverse Primer
gatttgcaagtcccattgct

SEQ ID NO: 18899 - DNA, 20 bp, Artificial Sequence
  Chr19q_4 Reverse Primer
gctgtaggaccctagaccca

SEQ ID NO: 18900 - DNA, 20 bp, Artificial Sequence
  Chr19q_4 Reverse Primer
acaaagtccagggaaaggct

SEQ ID NO: 18901 - DNA, 20 bp, Artificial Sequence
  Chr19q_4 Reverse Primer
gatccatcacctccctcaaa

SEQ ID NO: 18902 - DNA, 20 bp, Artificial Sequence
  Chr19q_4 Reverse Primer
actcccgtcttcagaaagca

SEQ ID NO: 18903 - DNA, 20 bp, Artificial Sequence
  Chr19q_4 Reverse Primer
ccccacaaccctacacaaaa

SEQ ID NO: 18904 - DNA, 20 bp, Artificial Sequence
  Chr19q_4 Reverse Primer
gatcttctcctctcccaccc

SEQ ID NO: 18905 - DNA, 20 bp, Artificial Sequence
  Chr19q_4 Reverse Primer
tttgaaactggttccaaggc

SEQ ID NO: 18906 - DNA, 19 bp, Artificial Sequence
  Chr19q_4 Reverse Primer
actccctagcggtgtgacc

SEQ ID NO: 18907 - DNA, 20 bp, Artificial Sequence
  Chr19q_4 Reverse Primer
gtcgactccagataggcagg

SEQ ID NO: 18908 - DNA, 20 bp, Artificial Sequence
  Chr19q_4 Reverse Primer
gccccaacagtctcatctgt

SEQ ID NO: 18909 - DNA, 20 bp, Artificial Sequence
  Chr19q_4 Reverse Primer
tcaggatggagaatccaagc

SEQ ID NO: 18910 - DNA, 20 bp, Artificial Sequence
  Chr19q_4 Reverse Primer
aggctgccaaccaagctcta

SEQ ID NO: 18911 - DNA, 20 bp, Artificial Sequence
  Chr19q_4 Reverse Primer
caagacagcctggacacaga

SEQ ID NO: 18912 - DNA, 20 bp, Artificial Sequence
  Chr19q_4 Reverse Primer
tgtgtggtcaggggtagaca

SEQ ID NO: 18913 - DNA, 20 bp, Artificial Sequence
  Chr19q_4 Reverse Primer
acactggccaaagaaacagc

SEQ ID NO: 18914 - DNA, 20 bp, Artificial Sequence
  Chr19q_4 Reverse Primer
ctcctgaccaccatcctcat

SEQ ID NO: 18915 - DNA, 21 bp, Artificial Sequence
  Chr19q_4 Reverse Primer
cagacaatgcgaattctttca

SEQ ID NO: 18916 - DNA, 20 bp, Artificial Sequence
  Chr19q_4 Reverse Primer
tttctatacccaccctcccc

SEQ ID NO: 18917 - DNA, 20 bp, Artificial Sequence
  Chr19q_4 Reverse Primer
tctggggagggacctactct

SEQ ID NO: 18918 - DNA, 20 bp, Artificial Sequence
  Chr19q_4 Reverse Primer
cctagaatcccagcctcctt

SEQ ID NO: 18919 - DNA, 20 bp, Artificial Sequence
  Chr19q_4 Reverse Primer
ccatgggcacactcttttct

SEQ ID NO: 18920 - DNA, 20 bp, Artificial Sequence
  Chr19q_4 Reverse Primer
gtggacagtgcctccttcat

SEQ ID NO: 18921 - DNA, 20 bp, Artificial Sequence
  Chr19q_4 Reverse Primer
agcaagcattctttgggaaa

SEQ ID NO: 18922 - DNA, 20 bp, Artificial Sequence
  Chr19q_4 Reverse Primer
gactccagggctcagaagaa

SEQ ID NO: 18923 - DNA, 20 bp, Artificial Sequence
  Chr19q_4 Reverse Primer
agttccatgagtccccacaa

SEQ ID NO: 18924 - DNA, 20 bp, Artificial Sequence
  Chr19q_4 Reverse Primer
agtcggtcatgagaccaagg

SEQ ID NO: 18925 - DNA, 20 bp, Artificial Sequence
  Chr19q_4 Reverse Primer
cagggcttttggatgacact

SEQ ID NO: 18926 - DNA, 20 bp, Artificial Sequence
  Chr19q_4 Reverse Primer
ggaaaaaccaaccagaaggc

SEQ ID NO: 18927 - DNA, 20 bp, Artificial Sequence
  Chr19q_4 Reverse Primer
gccctatctggtgttaggca

SEQ ID NO: 18928 - DNA, 20 bp, Artificial Sequence
  Chr19q_4 Reverse Primer
ggctgagtgtcctaagccag

SEQ ID NO: 18929 - DNA, 20 bp, Artificial Sequence
  Chr19q_4 Reverse Primer
ggcgtccatagtgctgaaat

SEQ ID NO: 18930 - DNA, 20 bp, Artificial Sequence
  Chr19q_4 Reverse Primer
cccagtggacttggttttgt

SEQ ID NO: 18931 - DNA, 20 bp, Artificial Sequence
  Chr19q_4 Reverse Primer
ctgtacaagcagagggaggc

SEQ ID NO: 18932 - DNA, 20 bp, Artificial Sequence
  Chr19q_4 Reverse Primer
ctttgtttgccagggaatgt

SEQ ID NO: 18933 - DNA, 21 bp, Artificial Sequence
  Chr19q_4 Reverse Primer
cgtaatggactgtgttctggg

SEQ ID NO: 18934 - DNA, 20 bp, Artificial Sequence
  Chr19q_4 Reverse Primer
gagaagagcttttcctgggg

SEQ ID NO: 18935 - DNA, 20 bp, Artificial Sequence
  Chr19q_4 Reverse Primer
gtgtttccaagcaccttcgt

SEQ ID NO: 18936 - DNA, 20 bp, Artificial Sequence
  Chr19q_4 Reverse Primer
agcataacctcgaaaagggg

SEQ ID NO: 18937 - DNA, 18 bp, Artificial Sequence
  Chr19q_4 Reverse Primer
accaccccctccacactc

SEQ ID NO: 18938 - DNA, 20 bp, Artificial Sequence
  Chr19q_4 Reverse Primer
gtcctctagtccctcagccc

SEQ ID NO: 18939 - DNA, 20 bp, Artificial Sequence
  Chr19q_4 Reverse Primer
gtcttccctcttcagccgtc

SEQ ID NO: 18940 - DNA, 20 bp, Artificial Sequence
  Chr19q_4 Reverse Primer
tccaccgtgacaaagacaga

SEQ ID NO: 18941 - DNA, 20 bp, Artificial Sequence
  Chr19q_4 Reverse Primer
ttctgacctggacacagacg

SEQ ID NO: 18942 - DNA, 20 bp, Artificial Sequence
  Chr19q_4 Reverse Primer
aagctggcagcagcactatt

SEQ ID NO: 18943 - DNA, 20 bp, Artificial Sequence
  Chr19q_4 Reverse Primer
atgcctcagccttcattgag

SEQ ID NO: 18944 - DNA, 18 bp, Artificial Sequence
  Chr19q_4 Reverse Primer
gaggcctctcctgtggga

SEQ ID NO: 18945 - DNA, 20 bp, Artificial Sequence
  Chr19q_4 Reverse Primer
gtgaacaggggcatctgact

SEQ ID NO: 18946 - DNA, 20 bp, Artificial Sequence
  Chr19q_4 Reverse Primer
tgggagactggaaagaggaa

SEQ ID NO: 18947 - DNA, 20 bp, Artificial Sequence
  Chr19q_4 Reverse Primer
tggcaaacagacgtcatctc

SEQ ID NO: 18948 - DNA, 20 bp, Artificial Sequence
  Chr19q_4 Reverse Primer
tgtttggagaaagggtcagg

SEQ ID NO: 18949 - DNA, 20 bp, Artificial Sequence
  Chr19q_4 Reverse Primer
caagggaggacagtcttgga

SEQ ID NO: 18950 - DNA, 20 bp, Artificial Sequence
  Chr19q_4 Reverse Primer
actcacactgtcgtatgcgg

SEQ ID NO: 18951 - DNA, 20 bp, Artificial Sequence
  Chr19q_4 Reverse Primer
acttcctaaaaagccgccat

SEQ ID NO: 18952 - DNA, 20 bp, Artificial Sequence
  Chr19q_4 Reverse Primer
gtgagcttgcatgtcctgaa

SEQ ID NO: 18953 - DNA, 20 bp, Artificial Sequence
  Chr19q_4 Reverse Primer
ctgaggcacacacaaacacc

SEQ ID NO: 18954 - DNA, 20 bp, Artificial Sequence
  Chr19q_4 Reverse Primer
ctttccgggagagaactcct

SEQ ID NO: 18955 - DNA, 20 bp, Artificial Sequence
  Chr19q_4 Reverse Primer
gtaacgtcgggggtcagaat

SEQ ID NO: 18956 - DNA, 19 bp, Artificial Sequence
  Chr19q_4 Reverse Primer
gaggggcagctccatagac

SEQ ID NO: 18957 - DNA, 18 bp, Artificial Sequence
  Chr19q_4 Reverse Primer
ggattgacccgacactcg

SEQ ID NO: 18958 - DNA, 18 bp, Artificial Sequence
  Chr19q_4 Reverse Primer
ggctcccgcataccaatg

SEQ ID NO: 18959 - DNA, 20 bp, Artificial Sequence
  Chr19q_4 Reverse Primer
atcagcccgggtagaaagtc

SEQ ID NO: 18960 - DNA, 20 bp, Artificial Sequence
  Chr19q_4 Reverse Primer
tcaattctggtgggaaggag

SEQ ID NO: 18961 - DNA, 20 bp, Artificial Sequence
  Chr19q_4 Reverse Primer
cagctcgaagaactccaggt

SEQ ID NO: 18962 - DNA, 20 bp, Artificial Sequence
  Chr19q_4 Reverse Primer
gtcctggctgactccagaga

SEQ ID NO: 18963 - DNA, 20 bp, Artificial Sequence
  Chr19q_4 Reverse Primer
aactgggggctcagactgta

SEQ ID NO: 18964 - DNA, 20 bp, Artificial Sequence
  Chr19q_4 Reverse Primer
ctgagctaggcacttccagg

SEQ ID NO: 18965 - DNA, 22 bp, Artificial Sequence
  Chr19q_5 Forward Primer
catgagtgttgtttcacactgc

SEQ ID NO: 18966 - DNA, 27 bp, Artificial Sequence
  Chr19q_5 Forward Primer
aaatgaaatatccatactatgcagttc

SEQ ID NO: 18967 - DNA, 22 bp, Artificial Sequence
  Chr19q_5 Forward Primer
aattaaaattgccacagaaagg

SEQ ID NO: 18968 - DNA, 20 bp, Artificial Sequence
  Chr19q_5 Forward Primer
tggcatctgaagcaatgaag

SEQ ID NO: 18969 - DNA, 20 bp, Artificial Sequence
  Chr19q_5 Forward Primer
ctccacaagtaccccatgct

SEQ ID NO: 18970 - DNA, 22 bp, Artificial Sequence
  Chr19q_5 Forward Primer
ttcttacagatagcgagatggc

SEQ ID NO: 18971 - DNA, 20 bp, Artificial Sequence
  Chr19q_5 Forward Primer
ctatttagccccataggccc

SEQ ID NO: 18972 - DNA, 20 bp, Artificial Sequence
  Chr19q_5 Forward Primer
ggagagagaccttgaggggt

SEQ ID NO: 18973 - DNA, 20 bp, Artificial Sequence
  Chr19q_5 Forward Primer
ggtgccagccatgattaagt

SEQ ID NO: 18974 - DNA, 20 bp, Artificial Sequence
  Chr19q_5 Forward Primer
ccactaactcccatcgcatt

SEQ ID NO: 18975 - DNA, 26 bp, Artificial Sequence
  Chr19q_5 Forward Primer
tgaaattacatatggtcactgtacga

SEQ ID NO: 18976 - DNA, 20 bp, Artificial Sequence
  Chr19q_5 Forward Primer
ctttcattcatttgcccgat

SEQ ID NO: 18977 - DNA, 20 bp, Artificial Sequence
  Chr19q_5 Forward Primer
ttctgcgttcaaagaaatgc

SEQ ID NO: 18978 - DNA, 27 bp, Artificial Sequence
  Chr19q_5 Forward Primer
aagaaaaacagacttcttactatgtgc

SEQ ID NO: 18979 - DNA, 20 bp, Artificial Sequence
  Chr19q_5 Forward Primer
cactggatgcccaggaaata

SEQ ID NO: 18980 - DNA, 21 bp, Artificial Sequence
  Chr19q_5 Forward Primer
gctttcagaagatggccagta

SEQ ID NO: 18981 - DNA, 20 bp, Artificial Sequence
  Chr19q_5 Forward Primer
gcacacacatgcacacacat

SEQ ID NO: 18982 - DNA, 20 bp, Artificial Sequence
  Chr19q_5 Forward Primer
tgttgcctcactcacacctc

SEQ ID NO: 18983 - DNA, 20 bp, Artificial Sequence
  Chr19q_5 Forward Primer
tcccgtgaatttactccctg

SEQ ID NO: 18984 - DNA, 20 bp, Artificial Sequence
  Chr19q_5 Forward Primer
gagacagccattctaggcga

SEQ ID NO: 18985 - DNA, 20 bp, Artificial Sequence
  Chr19q_5 Forward Primer
caattgccaagctgttaccc

SEQ ID NO: 18986 - DNA, 20 bp, Artificial Sequence
  Chr19q_5 Forward Primer
tgttctgtagcctcctgctg

SEQ ID NO: 18987 - DNA, 20 bp, Artificial Sequence
  Chr19q_5 Forward Primer
tggggactcccaaattacaa

SEQ ID NO: 18988 - DNA, 26 bp, Artificial Sequence
  Chr19q_5 Forward Primer
gagatcaccatttaaaattatggaaa

SEQ ID NO: 18989 - DNA, 21 bp, Artificial Sequence
  Chr19q_5 Forward Primer
caaagttcacacagccaatga

SEQ ID NO: 18990 - DNA, 20 bp, Artificial Sequence
  Chr19q_5 Forward Primer
tgctctcaaagaccattccc

SEQ ID NO: 18991 - DNA, 20 bp, Artificial Sequence
  Chr19q_5 Forward Primer
gcattccagcagttcacaga

SEQ ID NO: 18992 - DNA, 20 bp, Artificial Sequence
  Chr19q_5 Forward Primer
aagtctgcaggaggtagcca

SEQ ID NO: 18993 - DNA, 20 bp, Artificial Sequence
  Chr19q_5 Forward Primer
accaatcaccaggtcaaacc

SEQ ID NO: 18994 - DNA, 21 bp, Artificial Sequence
  Chr19q_5 Forward Primer
ttgcccatagaaggtgatagg

SEQ ID NO: 18995 - DNA, 20 bp, Artificial Sequence
  Chr19q_5 Forward Primer
gggtcttcagtggtcagctc

SEQ ID NO: 18996 - DNA, 20 bp, Artificial Sequence
  Chr19q_5 Forward Primer
taacggctgttcagcttcaa

SEQ ID NO: 18997 - DNA, 20 bp, Artificial Sequence
  Chr19q_5 Forward Primer
tcttgtttgctccctaacgg

SEQ ID NO: 18998 - DNA, 20 bp, Artificial Sequence
  Chr19q_5 Forward Primer
ggtaatgcagatctggggaa

SEQ ID NO: 18999 - DNA, 27 bp, Artificial Sequence
  Chr19q_5 Forward Primer
tcatgccttatcacataatttattttt

SEQ ID NO: 19000 - DNA, 20 bp, Artificial Sequence
  Chr19q_5 Forward Primer
cctccatgcttccatcaagt

SEQ ID NO: 19001 - DNA, 20 bp, Artificial Sequence
  Chr19q_5 Forward Primer
atattgcagccagaggcttg

SEQ ID NO: 19002 - DNA, 23 bp, Artificial Sequence
  Chr19q_5 Forward Primer
tcatatcttggtagaattgggga

SEQ ID NO: 19003 - DNA, 19 bp, Artificial Sequence
  Chr19q_5 Forward Primer
gagtccctccctcatgcac

SEQ ID NO: 19004 - DNA, 23 bp, Artificial Sequence
  Chr19q_5 Forward Primer
gcaagattttgctggtacatttt

SEQ ID NO: 19005 - DNA, 21 bp, Artificial Sequence
  Chr19q_5 Forward Primer
tcggtgtgacacaaacttgaa

SEQ ID NO: 19006 - DNA, 20 bp, Artificial Sequence
  Chr19q_5 Forward Primer
acagtccacaacacaacccc

SEQ ID NO: 19007 - DNA, 20 bp, Artificial Sequence
  Chr19q_5 Forward Primer
tcctgtgaccagaaccattg

SEQ ID NO: 19008 - DNA, 23 bp, Artificial Sequence
  Chr19q_5 Forward Primer
ggggtttcctcttgtatgagttt

SEQ ID NO: 19009 - DNA, 20 bp, Artificial Sequence
  Chr19q_5 Forward Primer
tctccacatttgctgcatgt

SEQ ID NO: 19010 - DNA, 21 bp, Artificial Sequence
  Chr19q_5 Forward Primer
ggcttcttttcccatttacca

SEQ ID NO: 19011 - DNA, 20 bp, Artificial Sequence
  Chr19q_5 Forward Primer
ttggggaaatttgcaaaaag

SEQ ID NO: 19012 - DNA, 20 bp, Artificial Sequence
  Chr19q_5 Forward Primer
cagggaatgctcccttgtag

SEQ ID NO: 19013 - DNA, 20 bp, Artificial Sequence
  Chr19q_5 Forward Primer
tcagggattttggaggtgag

SEQ ID NO: 19014 - DNA, 20 bp, Artificial Sequence
  Chr19q_5 Forward Primer
ttcccaggcaaatgtaggag

SEQ ID NO: 19015 - DNA, 20 bp, Artificial Sequence
  Chr19q_5 Forward Primer
aagccttgcaaagtcattgg

SEQ ID NO: 19016 - DNA, 20 bp, Artificial Sequence
  Chr19q_5 Forward Primer
acccccacccctaaatacag

SEQ ID NO: 19017 - DNA, 20 bp, Artificial Sequence
  Chr19q_5 Forward Primer
taggtaagacccatgccctg

SEQ ID NO: 19018 - DNA, 20 bp, Artificial Sequence
  Chr19q_5 Forward Primer
tcccataaacctcaactgcc

SEQ ID NO: 19019 - DNA, 21 bp, Artificial Sequence
  Chr19q_5 Forward Primer
aggattaacatcctaggggca

SEQ ID NO: 19020 - DNA, 20 bp, Artificial Sequence
  Chr19q_5 Forward Primer
tggtggaaatgcttgtgtgt

SEQ ID NO: 19021 - DNA, 20 bp, Artificial Sequence
  Chr19q_5 Forward Primer
cactaagctggggcaatcat

SEQ ID NO: 19022 - DNA, 20 bp, Artificial Sequence
  Chr19q_5 Forward Primer
cacgtccctccaagactctc

SEQ ID NO: 19023 - DNA, 20 bp, Artificial Sequence
  Chr19q_5 Forward Primer
tgggatataatggctggagg

SEQ ID NO: 19024 - DNA, 20 bp, Artificial Sequence
  Chr19q_5 Forward Primer
ctcccatatccaccaaatgc

SEQ ID NO: 19025 - DNA, 20 bp, Artificial Sequence
  Chr19q_5 Forward Primer
gtggcagaaggtgcaaaaat

SEQ ID NO: 19026 - DNA, 20 bp, Artificial Sequence
  Chr19q_5 Forward Primer
agatggaggggatggatgta

SEQ ID NO: 19027 - DNA, 20 bp, Artificial Sequence
  Chr19q_5 Forward Primer
aacagccagtgtgaaaaccc

SEQ ID NO: 19028 - DNA, 20 bp, Artificial Sequence
  Chr19q_5 Forward Primer
atgctggaggttatggcaga

SEQ ID NO: 19029 - DNA, 20 bp, Artificial Sequence
  Chr19q_5 Forward Primer
cagcgaaagagggcagtatc

SEQ ID NO: 19030 - DNA, 20 bp, Artificial Sequence
  Chr19q_5 Forward Primer
agcaatggaggcgataagaa

SEQ ID NO: 19031 - DNA, 20 bp, Artificial Sequence
  Chr19q_5 Forward Primer
taaccctgaagctgagggaa

SEQ ID NO: 19032 - DNA, 20 bp, Artificial Sequence
  Chr19q_5 Forward Primer
agcgggttagagtgcagatg

SEQ ID NO: 19033 - DNA, 20 bp, Artificial Sequence
  Chr19q_5 Forward Primer
tgattaggtttctgggccac

SEQ ID NO: 19034 - DNA, 23 bp, Artificial Sequence
  Chr19q_5 Forward Primer
cacgaaggcagtactagcataga

SEQ ID NO: 19035 - DNA, 20 bp, Artificial Sequence
  Chr19q_5 Forward Primer
cgacacagcaagactccaac

SEQ ID NO: 19036 - DNA, 20 bp, Artificial Sequence
  Chr19q_5 Forward Primer
agaaaaagcaaaacaagccg

SEQ ID NO: 19037 - DNA, 20 bp, Artificial Sequence
  Chr19q_5 Forward Primer
ggctttatcactgggcaaag

SEQ ID NO: 19038 - DNA, 20 bp, Artificial Sequence
  Chr19q_5 Forward Primer
cagagaaaacccacagggtc

SEQ ID NO: 19039 - DNA, 20 bp, Artificial Sequence
  Chr19q_5 Forward Primer
cttgcccatttcgttcaact

SEQ ID NO: 19040 - DNA, 20 bp, Artificial Sequence
  Chr19q_5 Forward Primer
ggcagtgatccagaggaaga

SEQ ID NO: 19041 - DNA, 20 bp, Artificial Sequence
  Chr19q_5 Forward Primer
acttaaaatcaccaccggca

SEQ ID NO: 19042 - DNA, 20 bp, Artificial Sequence
  Chr19q_5 Forward Primer
atctggggtctctcccttgt

SEQ ID NO: 19043 - DNA, 20 bp, Artificial Sequence
  Chr19q_5 Forward Primer
tgaattttgctgtcatccca

SEQ ID NO: 19044 - DNA, 20 bp, Artificial Sequence
  Chr19q_5 Forward Primer
aacccaaatgcagaaatcca

SEQ ID NO: 19045 - DNA, 21 bp, Artificial Sequence
  Chr19q_5 Forward Primer
aaaacaaaagtggaggcacag

SEQ ID NO: 19046 - DNA, 22 bp, Artificial Sequence
  Chr19q_5 Forward Primer
ttccattgattttcatccttcc

SEQ ID NO: 19047 - DNA, 20 bp, Artificial Sequence
  Chr19q_5 Forward Primer
aagatgagggcttctgggat

SEQ ID NO: 19048 - DNA, 20 bp, Artificial Sequence
  Chr19q_5 Forward Primer
accattcagtccctctccag

SEQ ID NO: 19049 - DNA, 20 bp, Artificial Sequence
  Chr19q_5 Forward Primer
tggtcaaaagcccttaggaa

SEQ ID NO: 19050 - DNA, 20 bp, Artificial Sequence
  Chr19q_5 Forward Primer
ccacagtccatacacttgcc

SEQ ID NO: 19051 - DNA, 21 bp, Artificial Sequence
  Chr19q_5 Forward Primer
gcaaccacttgatgaaactgc

SEQ ID NO: 19052 - DNA, 20 bp, Artificial Sequence
  Chr19q_5 Forward Primer
tatacagcagcagggaagca

SEQ ID NO: 19053 - DNA, 18 bp, Artificial Sequence
  Chr19q_5 Forward Primer
gagagctccccgcaacac

SEQ ID NO: 19054 - DNA, 20 bp, Artificial Sequence
  Chr19q_5 Forward Primer
ctttccggagacacggaata

SEQ ID NO: 19055 - DNA, 18 bp, Artificial Sequence
  Chr19q_5 Forward Primer
attagccaggggcgctac

SEQ ID NO: 19056 - DNA, 20 bp, Artificial Sequence
  Chr19q_5 Forward Primer
ggagaaagcagcctttgaga

SEQ ID NO: 19057 - DNA, 20 bp, Artificial Sequence
  Chr19q_5 Forward Primer
tctagcaccaaacctgctcc

SEQ ID NO: 19058 - DNA, 20 bp, Artificial Sequence
  Chr19q_5 Forward Primer
ttgtgacttggtgctgatgg

SEQ ID NO: 19059 - DNA, 20 bp, Artificial Sequence
  Chr19q_5 Forward Primer
ccactcagatctgcgaatca

SEQ ID NO: 19060 - DNA, 20 bp, Artificial Sequence
  Chr19q_5 Forward Primer
tcatgccctacttgcacaga

SEQ ID NO: 19061 - DNA, 20 bp, Artificial Sequence
  Chr19q_5 Reverse Primer
tcattccaatactcccaccc

SEQ ID NO: 19062 - DNA, 27 bp, Artificial Sequence
  Chr19q_5 Reverse Primer
tttgagtacatatttgaaaacttctga

SEQ ID NO: 19063 - DNA, 20 bp, Artificial Sequence
  Chr19q_5 Reverse Primer
actgtctgcatgactttggg

SEQ ID NO: 19064 - DNA, 20 bp, Artificial Sequence
  Chr19q_5 Reverse Primer
agaaggcttcagggaatggt

SEQ ID NO: 19065 - DNA, 20 bp, Artificial Sequence
  Chr19q_5 Reverse Primer
cacgcctggtttcaaagtct

SEQ ID NO: 19066 - DNA, 20 bp, Artificial Sequence
  Chr19q_5 Reverse Primer
tctgtgattggcttagggct

SEQ ID NO: 19067 - DNA, 20 bp, Artificial Sequence
  Chr19q_5 Reverse Primer
ggcttcccccttactacctg

SEQ ID NO: 19068 - DNA, 20 bp, Artificial Sequence
  Chr19q_5 Reverse Primer
cctgggaacctgatcttgaa

SEQ ID NO: 19069 - DNA, 20 bp, Artificial Sequence
  Chr19q_5 Reverse Primer
ccttaggtcaaaggcaggag

SEQ ID NO: 19070 - DNA, 21 bp, Artificial Sequence
  Chr19q_5 Reverse Primer
tgtgcatttcctgaaacagaa

SEQ ID NO: 19071 - DNA, 20 bp, Artificial Sequence
  Chr19q_5 Reverse Primer
ccaggatgtgatgttggaaa

SEQ ID NO: 19072 - DNA, 21 bp, Artificial Sequence
  Chr19q_5 Reverse Primer
tgcaatacataggctttctgc

SEQ ID NO: 19073 - DNA, 20 bp, Artificial Sequence
  Chr19q_5 Reverse Primer
gcacaatttccaaaatgcaa

SEQ ID NO: 19074 - DNA, 20 bp, Artificial Sequence
  Chr19q_5 Reverse Primer
ttcagtttttgtgtgccagc

SEQ ID NO: 19075 - DNA, 20 bp, Artificial Sequence
  Chr19q_5 Reverse Primer
tgtcgtagggtcctgaaagg

SEQ ID NO: 19076 - DNA, 20 bp, Artificial Sequence
  Chr19q_5 Reverse Primer
tttacgcggacttgctcttt

SEQ ID NO: 19077 - DNA, 19 bp, Artificial Sequence
  Chr19q_5 Reverse Primer
gtggggctggaacataagg

SEQ ID NO: 19078 - DNA, 20 bp, Artificial Sequence
  Chr19q_5 Reverse Primer
atcctctcctcatcgtgctc

SEQ ID NO: 19079 - DNA, 20 bp, Artificial Sequence
  Chr19q_5 Reverse Primer
aagatggtggcttccaacag

SEQ ID NO: 19080 - DNA, 20 bp, Artificial Sequence
  Chr19q_5 Reverse Primer
gccattttctgtttcggtgt

SEQ ID NO: 19081 - DNA, 20 bp, Artificial Sequence
  Chr19q_5 Reverse Primer
aaaccatccatgcacaacct

SEQ ID NO: 19082 - DNA, 20 bp, Artificial Sequence
  Chr19q_5 Reverse Primer
ctgacaccagctgcaagttc

SEQ ID NO: 19083 - DNA, 27 bp, Artificial Sequence
  Chr19q_5 Reverse Primer
gcttatcctaaacaaaagtaaaaatca

SEQ ID NO: 19084 - DNA, 20 bp, Artificial Sequence
  Chr19q_5 Reverse Primer
aaatgcctggcaaaatgact

SEQ ID NO: 19085 - DNA, 20 bp, Artificial Sequence
  Chr19q_5 Reverse Primer
caggagagaagtttgggtgc

SEQ ID NO: 19086 - DNA, 20 bp, Artificial Sequence
  Chr19q_5 Reverse Primer
ggtgatgcgtgagggtattc

SEQ ID NO: 19087 - DNA, 20 bp, Artificial Sequence
  Chr19q_5 Reverse Primer
gagctttccaaagagcagga

SEQ ID NO: 19088 - DNA, 20 bp, Artificial Sequence
  Chr19q_5 Reverse Primer
acagataggtgggatcacgg

SEQ ID NO: 19089 - DNA, 20 bp, Artificial Sequence
  Chr19q_5 Reverse Primer
cagagaaagccaggagcact

SEQ ID NO: 19090 - DNA, 20 bp, Artificial Sequence
  Chr19q_5 Reverse Primer
gccatgtaaagacagggcat

SEQ ID NO: 19091 - DNA, 20 bp, Artificial Sequence
  Chr19q_5 Reverse Primer
tacaacgcagttcacccaag

SEQ ID NO: 19092 - DNA, 20 bp, Artificial Sequence
  Chr19q_5 Reverse Primer
gggggcttacacactgaaga

SEQ ID NO: 19093 - DNA, 20 bp, Artificial Sequence
  Chr19q_5 Reverse Primer
aagcctcatcctcagagcaa

SEQ ID NO: 19094 - DNA, 20 bp, Artificial Sequence
  Chr19q_5 Reverse Primer
agagacaaggcctctgcgta

SEQ ID NO: 19095 - DNA, 24 bp, Artificial Sequence
  Chr19q_5 Reverse Primer
gggacatattcgaatttttaacag

SEQ ID NO: 19096 - DNA, 21 bp, Artificial Sequence
  Chr19q_5 Reverse Primer
gaaagcaagggtatgtggatg

SEQ ID NO: 19097 - DNA, 20 bp, Artificial Sequence
  Chr19q_5 Reverse Primer
gactcatggttggagctggt

SEQ ID NO: 19098 - DNA, 20 bp, Artificial Sequence
  Chr19q_5 Reverse Primer
tgagcagcctgaaagctaca

SEQ ID NO: 19099 - DNA, 20 bp, Artificial Sequence
  Chr19q_5 Reverse Primer
ctagatttttgccccttccc

SEQ ID NO: 19100 - DNA, 20 bp, Artificial Sequence
  Chr19q_5 Reverse Primer
tgcatgaactctggcacttc

SEQ ID NO: 19101 - DNA, 20 bp, Artificial Sequence
  Chr19q_5 Reverse Primer
tttttgcccactgtgatgat

SEQ ID NO: 19102 - DNA, 23 bp, Artificial Sequence
  Chr19q_5 Reverse Primer
tgtgtgatggcactttagatttg

SEQ ID NO: 19103 - DNA, 20 bp, Artificial Sequence
  Chr19q_5 Reverse Primer
acccattgcatagcaggaaa

SEQ ID NO: 19104 - DNA, 20 bp, Artificial Sequence
  Chr19q_5 Reverse Primer
cctacagatggagggaatgc

SEQ ID NO: 19105 - DNA, 20 bp, Artificial Sequence
  Chr19q_5 Reverse Primer
atgcaggaaacaaatcccag

SEQ ID NO: 19106 - DNA, 21 bp, Artificial Sequence
  Chr19q_5 Reverse Primer
acacacacaccacacacaggt

SEQ ID NO: 19107 - DNA, 20 bp, Artificial Sequence
  Chr19q_5 Reverse Primer
ctgagtcctgtgcagaatgg

SEQ ID NO: 19108 - DNA, 20 bp, Artificial Sequence
  Chr19q_5 Reverse Primer
acagggtgcaagcctaaaaa

SEQ ID NO: 19109 - DNA, 20 bp, Artificial Sequence
  Chr19q_5 Reverse Primer
cactcaagcttcgatgtcca

SEQ ID NO: 19110 - DNA, 20 bp, Artificial Sequence
  Chr19q_5 Reverse Primer
ttttccattctctgggcatc

SEQ ID NO: 19111 - DNA, 20 bp, Artificial Sequence
  Chr19q_5 Reverse Primer
aaaagctgggcctctctctg

SEQ ID NO: 19112 - DNA, 20 bp, Artificial Sequence
  Chr19q_5 Reverse Primer
acaactgctggtgcacagat

SEQ ID NO: 19113 - DNA, 20 bp, Artificial Sequence
  Chr19q_5 Reverse Primer
atctggcagttctgctttgg

SEQ ID NO: 19114 - DNA, 20 bp, Artificial Sequence
  Chr19q_5 Reverse Primer
ttaccagcaatcagcaccag

SEQ ID NO: 19115 - DNA, 25 bp, Artificial Sequence
  Chr19q_5 Reverse Primer
catgaagaaaactcagtagagaccc

SEQ ID NO: 19116 - DNA, 20 bp, Artificial Sequence
  Chr19q_5 Reverse Primer
tttgaggaattcaaggtggc

SEQ ID NO: 19117 - DNA, 20 bp, Artificial Sequence
  Chr19q_5 Reverse Primer
tttcatagccaacccaaaca

SEQ ID NO: 19118 - DNA, 20 bp, Artificial Sequence
  Chr19q_5 Reverse Primer
ttgtgatggtgcttttagcg

SEQ ID NO: 19119 - DNA, 21 bp, Artificial Sequence
  Chr19q_5 Reverse Primer
tggaacaaccttttccaagaa

SEQ ID NO: 19120 - DNA, 20 bp, Artificial Sequence
  Chr19q_5 Reverse Primer
cccagaaaaccaaaatgagc

SEQ ID NO: 19121 - DNA, 20 bp, Artificial Sequence
  Chr19q_5 Reverse Primer
tgtctccatttgcaaggtcc

SEQ ID NO: 19122 - DNA, 22 bp, Artificial Sequence
  Chr19q_5 Reverse Primer
tcttaccctatgatgtgagcca

SEQ ID NO: 19123 - DNA, 20 bp, Artificial Sequence
  Chr19q_5 Reverse Primer
ggtggcttactgccattgtt

SEQ ID NO: 19124 - DNA, 20 bp, Artificial Sequence
  Chr19q_5 Reverse Primer
aatggcaccagcacctacat

SEQ ID NO: 19125 - DNA, 20 bp, Artificial Sequence
  Chr19q_5 Reverse Primer
ggagaacccagccacataga

SEQ ID NO: 19126 - DNA, 20 bp, Artificial Sequence
  Chr19q_5 Reverse Primer
ctttccctccctgtgcatta

SEQ ID NO: 19127 - DNA, 20 bp, Artificial Sequence
  Chr19q_5 Reverse Primer
ccagaatcctcctttctccc

SEQ ID NO: 19128 - DNA, 20 bp, Artificial Sequence
  Chr19q_5 Reverse Primer
gcctccacaccatgtctctt

SEQ ID NO: 19129 - DNA, 20 bp, Artificial Sequence
  Chr19q_5 Reverse Primer
aagccagattcgctcttcaa

SEQ ID NO: 19130 - DNA, 21 bp, Artificial Sequence
  Chr19q_5 Reverse Primer
tgccttggagatcattgataa

SEQ ID NO: 19131 - DNA, 20 bp, Artificial Sequence
  Chr19q_5 Reverse Primer
accctttttctgcccaaact

SEQ ID NO: 19132 - DNA, 20 bp, Artificial Sequence
  Chr19q_5 Reverse Primer
gggctgcttgacctttgaat

SEQ ID NO: 19133 - DNA, 20 bp, Artificial Sequence
  Chr19q_5 Reverse Primer
gagcttttgtggttgacggt

SEQ ID NO: 19134 - DNA, 20 bp, Artificial Sequence
  Chr19q_5 Reverse Primer
ttgtttcccaatgggtctgt

SEQ ID NO: 19135 - DNA, 20 bp, Artificial Sequence
  Chr19q_5 Reverse Primer
aatccacaggttctggccta

SEQ ID NO: 19136 - DNA, 20 bp, Artificial Sequence
  Chr19q_5 Reverse Primer
agctggaactctagggcaca

SEQ ID NO: 19137 - DNA, 23 bp, Artificial Sequence
  Chr19q_5 Reverse Primer
aggaagaatgttaacctgcacaa

SEQ ID NO: 19138 - DNA, 20 bp, Artificial Sequence
  Chr19q_5 Reverse Primer
tgtctgtgtggaaggagcag

SEQ ID NO: 19139 - DNA, 20 bp, Artificial Sequence
  Chr19q_5 Reverse Primer
tttggactggtcctgtaggg

SEQ ID NO: 19140 - DNA, 20 bp, Artificial Sequence
  Chr19q_5 Reverse Primer
tcattgcccttctcggttac

SEQ ID NO: 19141 - DNA, 22 bp, Artificial Sequence
  Chr19q_5 Reverse Primer
ggcttcactttttctgtgattg

SEQ ID NO: 19142 - DNA, 23 bp, Artificial Sequence
  Chr19q_5 Reverse Primer
catgctgttttcttgtcagaatg

SEQ ID NO: 19143 - DNA, 23 bp, Artificial Sequence
  Chr19q_5 Reverse Primer
cgtcattcttgaagtcacatgat

SEQ ID NO: 19144 - DNA, 22 bp, Artificial Sequence
  Chr19q_5 Reverse Primer
tttgtgttgctctatttcccaa

SEQ ID NO: 19145 - DNA, 20 bp, Artificial Sequence
  Chr19q_5 Reverse Primer
gcctctgacttgggtacgtt

SEQ ID NO: 19146 - DNA, 20 bp, Artificial Sequence
  Chr19q_5 Reverse Primer
ataagacccctccccctttc

SEQ ID NO: 19147 - DNA, 20 bp, Artificial Sequence
  Chr19q_5 Reverse Primer
ggttcattgcgacccaagta

SEQ ID NO: 19148 - DNA, 20 bp, Artificial Sequence
  Chr19q_5 Reverse Primer
cgtgttggagttcccagagt

SEQ ID NO: 19149 - DNA, 18 bp, Artificial Sequence
  Chr19q_5 Reverse Primer
agtgtcgcgtctgcagtg

SEQ ID NO: 19150 - DNA, 20 bp, Artificial Sequence
  Chr19q_5 Reverse Primer
gtggactggaaaaagggtga

SEQ ID NO: 19151 - DNA, 22 bp, Artificial Sequence
  Chr19q_5 Reverse Primer
gtaataacccctccgattgttg

SEQ ID NO: 19152 - DNA, 20 bp, Artificial Sequence
  Chr19q_5 Reverse Primer
tgagagagccctgttttcgt

SEQ ID NO: 19153 - DNA, 20 bp, Artificial Sequence
  Chr19q_5 Reverse Primer
gctcacacactgaaattgcc

SEQ ID NO: 19154 - DNA, 20 bp, Artificial Sequence
  Chr19q_5 Reverse Primer
actgaagaggacgggacaac

SEQ ID NO: 19155 - DNA, 20 bp, Artificial Sequence
  Chr19q_5 Reverse Primer
ttccatatttggtgcagtgg

SEQ ID NO: 19156 - DNA, 27 bp, Artificial Sequence
  Chr19q_5 Reverse Primer
agctgatgttctaagaaaaactaaaag

SEQ ID NO: 19157 - DNA, 20 bp, Artificial Sequence
  Chr19q_6 Forward Primer
atcatgaaaggggtgctgag

SEQ ID NO: 19158 - DNA, 20 bp, Artificial Sequence
  Chr19q_6 Forward Primer
ccgctttctgaaaacagctt

SEQ ID NO: 19159 - DNA, 20 bp, Artificial Sequence
  Chr19q_6 Forward Primer
ttggagaggacagaaatggg

SEQ ID NO: 19160 - DNA, 20 bp, Artificial Sequence
  Chr19q_6 Forward Primer
caggacacagcctggaaaat

SEQ ID NO: 19161 - DNA, 21 bp, Artificial Sequence
  Chr19q_6 Forward Primer
tgtgctaagcaacactgagga

SEQ ID NO: 19162 - DNA, 20 bp, Artificial Sequence
  Chr19q_6 Forward Primer
agcagagaagatcagcaggg

SEQ ID NO: 19163 - DNA, 20 bp, Artificial Sequence
  Chr19q_6 Forward Primer
gaaaggagcgctgaaacatc

SEQ ID NO: 19164 - DNA, 20 bp, Artificial Sequence
  Chr19q_6 Forward Primer
ccttctcagcaagcctcact

SEQ ID NO: 19165 - DNA, 19 bp, Artificial Sequence
  Chr19q_6 Forward Primer
ggctgctggaggatgagat

SEQ ID NO: 19166 - DNA, 20 bp, Artificial Sequence
  Chr19q_6 Forward Primer
gtgctggctcctttctatgc

SEQ ID NO: 19167 - DNA, 20 bp, Artificial Sequence
  Chr19q_6 Forward Primer
ttaagactgaggagcgaggg

SEQ ID NO: 19168 - DNA, 20 bp, Artificial Sequence
  Chr19q_6 Forward Primer
tgtaaattcaatggagggca

SEQ ID NO: 19169 - DNA, 20 bp, Artificial Sequence
  Chr19q_6 Forward Primer
ttaactctgccgtccgctat

SEQ ID NO: 19170 - DNA, 20 bp, Artificial Sequence
  Chr19q_6 Forward Primer
gaaaaatccaaaacccgctt

SEQ ID NO: 19171 - DNA, 20 bp, Artificial Sequence
  Chr19q_6 Forward Primer
tgaggcaaataactgagggg

SEQ ID NO: 19172 - DNA, 20 bp, Artificial Sequence
  Chr19q_6 Forward Primer
gcacagctgtcacaggaaga

SEQ ID NO: 19173 - DNA, 22 bp, Artificial Sequence
  Chr19q_6 Forward Primer
ggtgagagtaacattgaaggca

SEQ ID NO: 19174 - DNA, 20 bp, Artificial Sequence
  Chr19q_6 Forward Primer
ctccaaaaagaacacctgcc

SEQ ID NO: 19175 - DNA, 20 bp, Artificial Sequence
  Chr19q_6 Forward Primer
acccttactctggggctcat

SEQ ID NO: 19176 - DNA, 20 bp, Artificial Sequence
  Chr19q_6 Forward Primer
ccagtggtgaaaccaggagt

SEQ ID NO: 19177 - DNA, 20 bp, Artificial Sequence
  Chr19q_6 Forward Primer
tcttcccaataacacccagg

SEQ ID NO: 19178 - DNA, 20 bp, Artificial Sequence
  Chr19q_6 Forward Primer
cccaggcaagtcacacagta

SEQ ID NO: 19179 - DNA, 19 bp, Artificial Sequence
  Chr19q_6 Forward Primer
gagaaccacagcagcgaag

SEQ ID NO: 19180 - DNA, 20 bp, Artificial Sequence
  Chr19q_6 Forward Primer
ctctcggggacagtaccacc

SEQ ID NO: 19181 - DNA, 19 bp, Artificial Sequence
  Chr19q_6 Forward Primer
ctcccacaaccacacgttc

SEQ ID NO: 19182 - DNA, 20 bp, Artificial Sequence
  Chr19q_6 Forward Primer
agcggagggatgtttctttt

SEQ ID NO: 19183 - DNA, 21 bp, Artificial Sequence
  Chr19q_6 Forward Primer
gcctgtgatttctttcttccc

SEQ ID NO: 19184 - DNA, 20 bp, Artificial Sequence
  Chr19q_6 Forward Primer
gtgcgaaaatctgggaaaaa

SEQ ID NO: 19185 - DNA, 20 bp, Artificial Sequence
  Chr19q_6 Forward Primer
tcaggatatcactggggagg

SEQ ID NO: 19186 - DNA, 20 bp, Artificial Sequence
  Chr19q_6 Forward Primer
tggagcttctcctaccctga

SEQ ID NO: 19187 - DNA, 20 bp, Artificial Sequence
  Chr19q_6 Forward Primer
atggtcttcaaagaaggggg

SEQ ID NO: 19188 - DNA, 20 bp, Artificial Sequence
  Chr19q_6 Forward Primer
gccctctgactgcaagagat

SEQ ID NO: 19189 - DNA, 20 bp, Artificial Sequence
  Chr19q_6 Forward Primer
ttctaccccatcagccactc

SEQ ID NO: 19190 - DNA, 20 bp, Artificial Sequence
  Chr19q_6 Forward Primer
ccaagacttgttgcctgaga

SEQ ID NO: 19191 - DNA, 20 bp, Artificial Sequence
  Chr19q_6 Forward Primer
ttgcttacttgctcagggtg

SEQ ID NO: 19192 - DNA, 21 bp, Artificial Sequence
  Chr19q_6 Forward Primer
tccccatttcagaaaagatcc

SEQ ID NO: 19193 - DNA, 20 bp, Artificial Sequence
  Chr19q_6 Forward Primer
tttggccatttgatgattga

SEQ ID NO: 19194 - DNA, 20 bp, Artificial Sequence
  Chr19q_6 Forward Primer
tccactttagtcccactggc

SEQ ID NO: 19195 - DNA, 20 bp, Artificial Sequence
  Chr19q_6 Forward Primer
ccactgtgtggtgagcatgt

SEQ ID NO: 19196 - DNA, 24 bp, Artificial Sequence
  Chr19q_6 Forward Primer
aacaatgctctgttttcagaagtc

SEQ ID NO: 19197 - DNA, 21 bp, Artificial Sequence
  Chr19q_6 Forward Primer
aatggggaaaaagaaaacaaa

SEQ ID NO: 19198 - DNA, 20 bp, Artificial Sequence
  Chr19q_6 Forward Primer
actagaggaacatgggctgg

SEQ ID NO: 19199 - DNA, 20 bp, Artificial Sequence
  Chr19q_6 Forward Primer
ttgggtctgcaatgattcct

SEQ ID NO: 19200 - DNA, 20 bp, Artificial Sequence
  Chr19q_6 Forward Primer
ccaaaatgaccagctttcct

SEQ ID NO: 19201 - DNA, 20 bp, Artificial Sequence
  Chr19q_6 Forward Primer
ctgccacctgagttcagaca

SEQ ID NO: 19202 - DNA, 20 bp, Artificial Sequence
  Chr19q_6 Forward Primer
atcttccttcccacccattc

SEQ ID NO: 19203 - DNA, 20 bp, Artificial Sequence
  Chr19q_6 Forward Primer
tggggaaagatggttacctg

SEQ ID NO: 19204 - DNA, 20 bp, Artificial Sequence
  Chr19q_6 Forward Primer
cagcaggtgctgtgtgagat

SEQ ID NO: 19205 - DNA, 20 bp, Artificial Sequence
  Chr19q_6 Forward Primer
tcagatgactgtggctggag

SEQ ID NO: 19206 - DNA, 20 bp, Artificial Sequence
  Chr19q_6 Forward Primer
cccagccagagatgctaagt

SEQ ID NO: 19207 - DNA, 20 bp, Artificial Sequence
  Chr19q_6 Forward Primer
gcacatgatgttgaccatgc

SEQ ID NO: 19208 - DNA, 21 bp, Artificial Sequence
  Chr19q_6 Forward Primer
cactgcatttaatctcctggg

SEQ ID NO: 19209 - DNA, 20 bp, Artificial Sequence
  Chr19q_6 Forward Primer
tatgtgggttggggtcatct

SEQ ID NO: 19210 - DNA, 20 bp, Artificial Sequence
  Chr19q_6 Forward Primer
tacagagcttggtcttgggc

SEQ ID NO: 19211 - DNA, 20 bp, Artificial Sequence
  Chr19q_6 Forward Primer
tgggaaagacatggtctgaa

SEQ ID NO: 19212 - DNA, 20 bp, Artificial Sequence
  Chr19q_6 Forward Primer
caggaggaaaacaaaaccca

SEQ ID NO: 19213 - DNA, 20 bp, Artificial Sequence
  Chr19q_6 Forward Primer
ttcctgtttccctcatttgc

SEQ ID NO: 19214 - DNA, 22 bp, Artificial Sequence
  Chr19q_6 Forward Primer
tctctgctatgccagaaaatga

SEQ ID NO: 19215 - DNA, 20 bp, Artificial Sequence
  Chr19q_6 Forward Primer
tgtctgcaactcagggtttg

SEQ ID NO: 19216 - DNA, 20 bp, Artificial Sequence
  Chr19q_6 Forward Primer
ccatgatatcgaccatgcag

SEQ ID NO: 19217 - DNA, 20 bp, Artificial Sequence
  Chr19q_6 Forward Primer
cctgggctgtaaatcaggaa

SEQ ID NO: 19218 - DNA, 21 bp, Artificial Sequence
  Chr19q_6 Forward Primer
ttaataaagctgaccccaagc

SEQ ID NO: 19219 - DNA, 21 bp, Artificial Sequence
  Chr19q_6 Forward Primer
tgcactgttacaggatggaaa

SEQ ID NO: 19220 - DNA, 23 bp, Artificial Sequence
  Chr19q_6 Forward Primer
tccatagccctttttactgttca

SEQ ID NO: 19221 - DNA, 20 bp, Artificial Sequence
  Chr19q_6 Forward Primer
gattggttccaaaaacgtcg

SEQ ID NO: 19222 - DNA, 20 bp, Artificial Sequence
  Chr19q_6 Forward Primer
caggccccaggaactagtaa

SEQ ID NO: 19223 - DNA, 20 bp, Artificial Sequence
  Chr19q_6 Forward Primer
tctgtccccaggacgactac

SEQ ID NO: 19224 - DNA, 20 bp, Artificial Sequence
  Chr19q_6 Forward Primer
cggtgtgtgttcgagagaga

SEQ ID NO: 19225 - DNA, 20 bp, Artificial Sequence
  Chr19q_6 Forward Primer
tcagggactggattgtgaga

SEQ ID NO: 19226 - DNA, 22 bp, Artificial Sequence
  Chr19q_6 Forward Primer
ggagcatttgagtaactgaggc

SEQ ID NO: 19227 - DNA, 20 bp, Artificial Sequence
  Chr19q_6 Forward Primer
ctcaggcaatggaaatgtga

SEQ ID NO: 19228 - DNA, 20 bp, Artificial Sequence
  Chr19q_6 Forward Primer
ctgaagcaggagacaccctc

SEQ ID NO: 19229 - DNA, 20 bp, Artificial Sequence
  Chr19q_6 Forward Primer
tttttcccaaaaaccccatc

SEQ ID NO: 19230 - DNA, 20 bp, Artificial Sequence
  Chr19q_6 Forward Primer
cccagttatgggatcaacca

SEQ ID NO: 19231 - DNA, 20 bp, Artificial Sequence
  Chr19q_6 Forward Primer
ctcaggggccactgtcttta

SEQ ID NO: 19232 - DNA, 23 bp, Artificial Sequence
  Chr19q_6 Forward Primer
tcctctacctgaagttttctcca

SEQ ID NO: 19233 - DNA, 21 bp, Artificial Sequence
  Chr19q_6 Forward Primer
gagctatgttatgcctttgcg

SEQ ID NO: 19234 - DNA, 20 bp, Artificial Sequence
  Chr19q_6 Forward Primer
tttttcaagttggcacaatg

SEQ ID NO: 19235 - DNA, 20 bp, Artificial Sequence
  Chr19q_6 Forward Primer
ctgtgaaattcccctcctca

SEQ ID NO: 19236 - DNA, 19 bp, Artificial Sequence
  Chr19q_6 Forward Primer
tagtcccctccaatttgcc

SEQ ID NO: 19237 - DNA, 20 bp, Artificial Sequence
  Chr19q_6 Forward Primer
tcagatgctatccattggga

SEQ ID NO: 19238 - DNA, 20 bp, Artificial Sequence
  Chr19q_6 Forward Primer
tgtgaacaccttttgcttgc

SEQ ID NO: 19239 - DNA, 21 bp, Artificial Sequence
  Chr19q_6 Forward Primer
tttgcaaatcaggcactaaga

SEQ ID NO: 19240 - DNA, 20 bp, Artificial Sequence
  Chr19q_6 Forward Primer
gttcaatgcctttctccagc

SEQ ID NO: 19241 - DNA, 20 bp, Artificial Sequence
  Chr19q_6 Forward Primer
tgttttggcttggatcttcc

SEQ ID NO: 19242 - DNA, 20 bp, Artificial Sequence
  Chr19q_6 Forward Primer
ggatcttttccctcctgcat

SEQ ID NO: 19243 - DNA, 23 bp, Artificial Sequence
  Chr19q_6 Forward Primer
gacaacaacaaggttcacaaaga

SEQ ID NO: 19244 - DNA, 20 bp, Artificial Sequence
  Chr19q_6 Forward Primer
gcccagctcagattggataa

SEQ ID NO: 19245 - DNA, 20 bp, Artificial Sequence
  Chr19q_6 Forward Primer
cgttattgcagtgtgagcgt

SEQ ID NO: 19246 - DNA, 20 bp, Artificial Sequence
  Chr19q_6 Forward Primer
ggctaaatttctgccctcaa

SEQ ID NO: 19247 - DNA, 20 bp, Artificial Sequence
  Chr19q_6 Forward Primer
gagagagccttgggagatga

SEQ ID NO: 19248 - DNA, 22 bp, Artificial Sequence
  Chr19q_6 Forward Primer
gcaaaaatcattatccagctcc

SEQ ID NO: 19249 - DNA, 20 bp, Artificial Sequence
  Chr19q_6 Forward Primer
tctcaagagccttgggagac

SEQ ID NO: 19250 - DNA, 20 bp, Artificial Sequence
  Chr19q_6 Forward Primer
tgtgatgaacatttccccat

SEQ ID NO: 19251 - DNA, 20 bp, Artificial Sequence
  Chr19q_6 Forward Primer
ccactgtggataaggaggga

SEQ ID NO: 19252 - DNA, 20 bp, Artificial Sequence
  Chr19q_6 Forward Primer
aaaaaggccaggaaatgagg

SEQ ID NO: 19253 - DNA, 20 bp, Artificial Sequence
  Chr19q_6 Reverse Primer
cggatttctgcaaagctacc

SEQ ID NO: 19254 - DNA, 20 bp, Artificial Sequence
  Chr19q_6 Reverse Primer
tcagcacactgaggatctgg

SEQ ID NO: 19255 - DNA, 20 bp, Artificial Sequence
  Chr19q_6 Reverse Primer
gggtatgacgatggcattct

SEQ ID NO: 19256 - DNA, 20 bp, Artificial Sequence
  Chr19q_6 Reverse Primer
aatccaagcattcttctgcc

SEQ ID NO: 19257 - DNA, 20 bp, Artificial Sequence
  Chr19q_6 Reverse Primer
ggtgccacacagtagggtta

SEQ ID NO: 19258 - DNA, 20 bp, Artificial Sequence
  Chr19q_6 Reverse Primer
ggggttcaacataaggcgta

SEQ ID NO: 19259 - DNA, 20 bp, Artificial Sequence
  Chr19q_6 Reverse Primer
taggaacacttgccaccctc

SEQ ID NO: 19260 - DNA, 20 bp, Artificial Sequence
  Chr19q_6 Reverse Primer
gtgtgctggatgctggtcta

SEQ ID NO: 19261 - DNA, 20 bp, Artificial Sequence
  Chr19q_6 Reverse Primer
atggagcacattcagcacac

SEQ ID NO: 19262 - DNA, 20 bp, Artificial Sequence
  Chr19q_6 Reverse Primer
tagtggactcctgccatgtg

SEQ ID NO: 19263 - DNA, 20 bp, Artificial Sequence
  Chr19q_6 Reverse Primer
ataaatcacccctgcagcaa

SEQ ID NO: 19264 - DNA, 20 bp, Artificial Sequence
  Chr19q_6 Reverse Primer
ccccttacccaaggaaatgt

SEQ ID NO: 19265 - DNA, 20 bp, Artificial Sequence
  Chr19q_6 Reverse Primer
tccaatctcctgatggtggt

SEQ ID NO: 19266 - DNA, 20 bp, Artificial Sequence
  Chr19q_6 Reverse Primer
tcctcacctcaggaggacat

SEQ ID NO: 19267 - DNA, 20 bp, Artificial Sequence
  Chr19q_6 Reverse Primer
ggccaggagtgatttttgaa

SEQ ID NO: 19268 - DNA, 20 bp, Artificial Sequence
  Chr19q_6 Reverse Primer
ttgatttggaggagtcaggg

SEQ ID NO: 19269 - DNA, 20 bp, Artificial Sequence
  Chr19q_6 Reverse Primer
ttttggtcaactccagagcc

SEQ ID NO: 19270 - DNA, 20 bp, Artificial Sequence
  Chr19q_6 Reverse Primer
ttcattcagccagtgagtgc

SEQ ID NO: 19271 - DNA, 20 bp, Artificial Sequence
  Chr19q_6 Reverse Primer
ttaagtccaccactcctcgg

SEQ ID NO: 19272 - DNA, 20 bp, Artificial Sequence
  Chr19q_6 Reverse Primer
ggcatctgaccatctccagt

SEQ ID NO: 19273 - DNA, 20 bp, Artificial Sequence
  Chr19q_6 Reverse Primer
ggctttgcggttatgagtgt

SEQ ID NO: 19274 - DNA, 20 bp, Artificial Sequence
  Chr19q_6 Reverse Primer
tgtgtgagggagctatgtcg

SEQ ID NO: 19275 - DNA, 19 bp, Artificial Sequence
  Chr19q_6 Reverse Primer
gcgagagtgtgggtgtgtc

SEQ ID NO: 19276 - DNA, 19 bp, Artificial Sequence
  Chr19q_6 Reverse Primer
gaggaagggcctcagtgtc

SEQ ID NO: 19277 - DNA, 20 bp, Artificial Sequence
  Chr19q_6 Reverse Primer
gccttcttcacctcacgttc

SEQ ID NO: 19278 - DNA, 20 bp, Artificial Sequence
  Chr19q_6 Reverse Primer
tcatccacccagtctcaacc

SEQ ID NO: 19279 - DNA, 20 bp, Artificial Sequence
  Chr19q_6 Reverse Primer
ttgaccagggacaacaatca

SEQ ID NO: 19280 - DNA, 20 bp, Artificial Sequence
  Chr19q_6 Reverse Primer
gaccaaatccaagaccagga

SEQ ID NO: 19281 - DNA, 20 bp, Artificial Sequence
  Chr19q_6 Reverse Primer
aagggagggagagagaagca

SEQ ID NO: 19282 - DNA, 20 bp, Artificial Sequence
  Chr19q_6 Reverse Primer
agccagcacacaacactgag

SEQ ID NO: 19283 - DNA, 21 bp, Artificial Sequence
  Chr19q_6 Reverse Primer
gaagaggtgactcaggctcaa

SEQ ID NO: 19284 - DNA, 20 bp, Artificial Sequence
  Chr19q_6 Reverse Primer
taggtgcagaagaatgccct

SEQ ID NO: 19285 - DNA, 20 bp, Artificial Sequence
  Chr19q_6 Reverse Primer
agctcatgagaggaaaggga

SEQ ID NO: 19286 - DNA, 20 bp, Artificial Sequence
  Chr19q_6 Reverse Primer
acatggacagctcatccaca

SEQ ID NO: 19287 - DNA, 24 bp, Artificial Sequence
  Chr19q_6 Reverse Primer
tgggggagttgtttaaagagtatg

SEQ ID NO: 19288 - DNA, 20 bp, Artificial Sequence
  Chr19q_6 Reverse Primer
tcagcaacctcacatcttgg

SEQ ID NO: 19289 - DNA, 20 bp, Artificial Sequence
  Chr19q_6 Reverse Primer
aggccattgtgaggaatctg

SEQ ID NO: 19290 - DNA, 20 bp, Artificial Sequence
  Chr19q_6 Reverse Primer
gggtgggaagattccatttt

SEQ ID NO: 19291 - DNA, 21 bp, Artificial Sequence
  Chr19q_6 Reverse Primer
gctcacagtgctgatctaggc

SEQ ID NO: 19292 - DNA, 22 bp, Artificial Sequence
  Chr19q_6 Reverse Primer
aaggatggttcatgagaaaagg

SEQ ID NO: 19293 - DNA, 21 bp, Artificial Sequence
  Chr19q_6 Reverse Primer
ggacactcagatctaacggca

SEQ ID NO: 19294 - DNA, 20 bp, Artificial Sequence
  Chr19q_6 Reverse Primer
tgcagctctttggtaatcca

SEQ ID NO: 19295 - DNA, 20 bp, Artificial Sequence
  Chr19q_6 Reverse Primer
ggtgtccttgcattgatttg

SEQ ID NO: 19296 - DNA, 20 bp, Artificial Sequence
  Chr19q_6 Reverse Primer
ttggttttcttgtcccttgc

SEQ ID NO: 19297 - DNA, 20 bp, Artificial Sequence
  Chr19q_6 Reverse Primer
attggattccagcaaggatg

SEQ ID NO: 19298 - DNA, 20 bp, Artificial Sequence
  Chr19q_6 Reverse Primer
aagatcaaggatggtcgctg

SEQ ID NO: 19299 - DNA, 20 bp, Artificial Sequence
  Chr19q_6 Reverse Primer
cattcacttcacccatgtgc

SEQ ID NO: 19300 - DNA, 21 bp, Artificial Sequence
  Chr19q_6 Reverse Primer
aaaaacatgtgttagcagcca

SEQ ID NO: 19301 - DNA, 20 bp, Artificial Sequence
  Chr19q_6 Reverse Primer
gaaagcaagctgaccattcc

SEQ ID NO: 19302 - DNA, 20 bp, Artificial Sequence
  Chr19q_6 Reverse Primer
cagcataacatgctcccaaa

SEQ ID NO: 19303 - DNA, 20 bp, Artificial Sequence
  Chr19q_6 Reverse Primer
gcctccaggatccattgtta

SEQ ID NO: 19304 - DNA, 20 bp, Artificial Sequence
  Chr19q_6 Reverse Primer
ttgtatttgggcacgacaaa

SEQ ID NO: 19305 - DNA, 20 bp, Artificial Sequence
  Chr19q_6 Reverse Primer
tactggcaaatagtgcagcg

SEQ ID NO: 19306 - DNA, 20 bp, Artificial Sequence
  Chr19q_6 Reverse Primer
gctatgtttcatttgctggc

SEQ ID NO: 19307 - DNA, 20 bp, Artificial Sequence
  Chr19q_6 Reverse Primer
ctggtattgccccagagaat

SEQ ID NO: 19308 - DNA, 20 bp, Artificial Sequence
  Chr19q_6 Reverse Primer
agaccaccatgccagtgtct

SEQ ID NO: 19309 - DNA, 21 bp, Artificial Sequence
  Chr19q_6 Reverse Primer
ttcacagcagaaacgacaaag

SEQ ID NO: 19310 - DNA, 20 bp, Artificial Sequence
  Chr19q_6 Reverse Primer
atacgtcagatgccccactc

SEQ ID NO: 19311 - DNA, 20 bp, Artificial Sequence
  Chr19q_6 Reverse Primer
tagtgctgagaccccttcca

SEQ ID NO: 19312 - DNA, 20 bp, Artificial Sequence
  Chr19q_6 Reverse Primer
tgcagagtggcctctaggat

SEQ ID NO: 19313 - DNA, 20 bp, Artificial Sequence
  Chr19q_6 Reverse Primer
ttcacgccatcatgttgaat

SEQ ID NO: 19314 - DNA, 20 bp, Artificial Sequence
  Chr19q_6 Reverse Primer
acagtgttggtgaccaggtg

SEQ ID NO: 19315 - DNA, 20 bp, Artificial Sequence
  Chr19q_6 Reverse Primer
ccacatttttgttcatgggc

SEQ ID NO: 19316 - DNA, 20 bp, Artificial Sequence
  Chr19q_6 Reverse Primer
gtccccgttttaggggacta

SEQ ID NO: 19317 - DNA, 20 bp, Artificial Sequence
  Chr19q_6 Reverse Primer
ctgtgatcgcgatgtcattc

SEQ ID NO: 19318 - DNA, 20 bp, Artificial Sequence
  Chr19q_6 Reverse Primer
ggcctagtgttgaggggatt

SEQ ID NO: 19319 - DNA, 20 bp, Artificial Sequence
  Chr19q_6 Reverse Primer
cacacacagaaaccacaccc

SEQ ID NO: 19320 - DNA, 20 bp, Artificial Sequence
  Chr19q_6 Reverse Primer
ccctggtctcacactctggt

SEQ ID NO: 19321 - DNA, 21 bp, Artificial Sequence
  Chr19q_6 Reverse Primer
actcacaccaacataccccag

SEQ ID NO: 19322 - DNA, 20 bp, Artificial Sequence
  Chr19q_6 Reverse Primer
catgcatgcttcacaacctc

SEQ ID NO: 19323 - DNA, 20 bp, Artificial Sequence
  Chr19q_6 Reverse Primer
cacacaattccaaacagcca

SEQ ID NO: 19324 - DNA, 20 bp, Artificial Sequence
  Chr19q_6 Reverse Primer
atctgactcccaaatgccac

SEQ ID NO: 19325 - DNA, 21 bp, Artificial Sequence
  Chr19q_6 Reverse Primer
ttcccattcagatgcattagg

SEQ ID NO: 19326 - DNA, 20 bp, Artificial Sequence
  Chr19q_6 Reverse Primer
cactaacctggggcatgact

SEQ ID NO: 19327 - DNA, 20 bp, Artificial Sequence
  Chr19q_6 Reverse Primer
taacctggagcccaactcac

SEQ ID NO: 19328 - DNA, 23 bp, Artificial Sequence
  Chr19q_6 Reverse Primer
gggagttaagggtgaaatttgtt

SEQ ID NO: 19329 - DNA, 22 bp, Artificial Sequence
  Chr19q_6 Reverse Primer
tgtaatttcagccctaccatga

SEQ ID NO: 19330 - DNA, 26 bp, Artificial Sequence
  Chr19q_6 Reverse Primer
ggattcctttttatacattgtttctt

SEQ ID NO: 19331 - DNA, 20 bp, Artificial Sequence
  Chr19q_6 Reverse Primer
aggaagacacagatgcccag

SEQ ID NO: 19332 - DNA, 20 bp, Artificial Sequence
  Chr19q_6 Reverse Primer
gcatgtgtgtgtgcatttca

SEQ ID NO: 19333 - DNA, 20 bp, Artificial Sequence
  Chr19q_6 Reverse Primer
cagaggagctttggctgttc

SEQ ID NO: 19334 - DNA, 24 bp, Artificial Sequence
  Chr19q_6 Reverse Primer
ttcaatgtacgggactttagaaga

SEQ ID NO: 19335 - DNA, 20 bp, Artificial Sequence
  Chr19q_6 Reverse Primer
cggttggtagaacccacagt

SEQ ID NO: 19336 - DNA, 20 bp, Artificial Sequence
  Chr19q_6 Reverse Primer
actgcattgggtacaatggg

SEQ ID NO: 19337 - DNA, 20 bp, Artificial Sequence
  Chr19q_6 Reverse Primer
gcttctgagcagggttcatc

SEQ ID NO: 19338 - DNA, 20 bp, Artificial Sequence
  Chr19q_6 Reverse Primer
cttgtgttcccaattgcctt

SEQ ID NO: 19339 - DNA, 20 bp, Artificial Sequence
  Chr19q_6 Reverse Primer
gggcttctggagaacagaaa

SEQ ID NO: 19340 - DNA, 23 bp, Artificial Sequence
  Chr19q_6 Reverse Primer
ggcaaatatgcttgaaataaatg

SEQ ID NO: 19341 - DNA, 24 bp, Artificial Sequence
  Chr19q_6 Reverse Primer
aaaaggtccctagaaacagtttga

SEQ ID NO: 19342 - DNA, 21 bp, Artificial Sequence
  Chr19q_6 Reverse Primer
gaaaattggtcatgttttggg

SEQ ID NO: 19343 - DNA, 20 bp, Artificial Sequence
  Chr19q_6 Reverse Primer
ggcccatgtgaagcataaag

SEQ ID NO: 19344 - DNA, 21 bp, Artificial Sequence
  Chr19q_6 Reverse Primer
aaggagctgatcaggaagagg

SEQ ID NO: 19345 - DNA, 20 bp, Artificial Sequence
  Chr19q_6 Reverse Primer
caggagaggaacactctggg

SEQ ID NO: 19346 - DNA, 20 bp, Artificial Sequence
  Chr19q_6 Reverse Primer
cagaagggaaaggagaatgc

SEQ ID NO: 19347 - DNA, 20 bp, Artificial Sequence
  Chr19q_6 Reverse Primer
ctcagcatcccaccagactt

SEQ ID NO: 19348 - DNA, 20 bp, Artificial Sequence
  Chr19q_6 Reverse Primer
aagaattgaggcaatgtggg

SEQ ID NO: 19349 - DNA, 20 bp, Artificial Sequence
  Chr20q_1 Forward Primer
tttggctctgaggctctgtt

SEQ ID NO: 19350 - DNA, 20 bp, Artificial Sequence
  Chr20q_1 Forward Primer
acaggccctctttcctgttt

SEQ ID NO: 19351 - DNA, 20 bp, Artificial Sequence
  Chr20q_1 Forward Primer
gggtggtgaccttgctgtat

SEQ ID NO: 19352 - DNA, 20 bp, Artificial Sequence
  Chr20q_1 Forward Primer
ggtacctccctagcctggac

SEQ ID NO: 19353 - DNA, 20 bp, Artificial Sequence
  Chr20q_1 Forward Primer
aagcccaatgacctctgatg

SEQ ID NO: 19354 - DNA, 20 bp, Artificial Sequence
  Chr20q_1 Forward Primer
tgatcagtgggaggaagagg

SEQ ID NO: 19355 - DNA, 20 bp, Artificial Sequence
  Chr20q_1 Forward Primer
gagactcagggctgttttgc

SEQ ID NO: 19356 - DNA, 20 bp, Artificial Sequence
  Chr20q_1 Forward Primer
agcagctggaggtgctagag

SEQ ID NO: 19357 - DNA, 20 bp, Artificial Sequence
  Chr20q_1 Forward Primer
gggaacttgccagaagacag

SEQ ID NO: 19358 - DNA, 20 bp, Artificial Sequence
  Chr20q_1 Forward Primer
gttcagagtaggctgggctg

SEQ ID NO: 19359 - DNA, 20 bp, Artificial Sequence
  Chr20q_1 Forward Primer
aaacgccagcatagaacctg

SEQ ID NO: 19360 - DNA, 20 bp, Artificial Sequence
  Chr20q_1 Forward Primer
agtcaggagatgctgatggg

SEQ ID NO: 19361 - DNA, 20 bp, Artificial Sequence
  Chr20q_1 Forward Primer
agccaggatccctcatcttt

SEQ ID NO: 19362 - DNA, 21 bp, Artificial Sequence
  Chr20q_1 Forward Primer
cgtcaactcctctaccaagca

SEQ ID NO: 19363 - DNA, 20 bp, Artificial Sequence
  Chr20q_1 Forward Primer
aaagcagcagtgttgggaat

SEQ ID NO: 19364 - DNA, 20 bp, Artificial Sequence
  Chr20q_1 Forward Primer
ggccctaactgagagcaaga

SEQ ID NO: 19365 - DNA, 22 bp, Artificial Sequence
  Chr20q_1 Forward Primer
caccagaaaagaatctgctgaa

SEQ ID NO: 19366 - DNA, 20 bp, Artificial Sequence
  Chr20q_1 Forward Primer
tactcccttccctttttggc

SEQ ID NO: 19367 - DNA, 20 bp, Artificial Sequence
  Chr20q_1 Forward Primer
cattcacaccacccagtttg

SEQ ID NO: 19368 - DNA, 20 bp, Artificial Sequence
  Chr20q_1 Forward Primer
cctgagccaatgaatgacct

SEQ ID NO: 19369 - DNA, 20 bp, Artificial Sequence
  Chr20q_1 Forward Primer
ggagcagctacatcaggagg

SEQ ID NO: 19370 - DNA, 22 bp, Artificial Sequence
  Chr20q_1 Forward Primer
gctaagctccctgccataagta

SEQ ID NO: 19371 - DNA, 20 bp, Artificial Sequence
  Chr20q_1 Forward Primer
gctggaggtccagattcaaa

SEQ ID NO: 19372 - DNA, 20 bp, Artificial Sequence
  Chr20q_1 Forward Primer
tggacactgaacggagtcag

SEQ ID NO: 19373 - DNA, 22 bp, Artificial Sequence
  Chr20q_1 Forward Primer
gctgtaaaatccaacttcctgc

SEQ ID NO: 19374 - DNA, 20 bp, Artificial Sequence
  Chr20q_1 Forward Primer
tccttttcagctgtgtcgaa

SEQ ID NO: 19375 - DNA, 20 bp, Artificial Sequence
  Chr20q_1 Forward Primer
tttttgacccacagtcaggc

SEQ ID NO: 19376 - DNA, 20 bp, Artificial Sequence
  Chr20q_1 Forward Primer
cgtagctggagggttcagag

SEQ ID NO: 19377 - DNA, 20 bp, Artificial Sequence
  Chr20q_1 Forward Primer
gccttggtttccctaaaagg

SEQ ID NO: 19378 - DNA, 20 bp, Artificial Sequence
  Chr20q_1 Forward Primer
ggcccaaactcctaaccatt

SEQ ID NO: 19379 - DNA, 20 bp, Artificial Sequence
  Chr20q_1 Forward Primer
aaggtggcactttgaactgg

SEQ ID NO: 19380 - DNA, 20 bp, Artificial Sequence
  Chr20q_1 Forward Primer
tttccaatccagtacccctg

SEQ ID NO: 19381 - DNA, 20 bp, Artificial Sequence
  Chr20q_1 Forward Primer
gtccagtcagcgatctcctt

SEQ ID NO: 19382 - DNA, 20 bp, Artificial Sequence
  Chr20q_1 Forward Primer
atgggctcagaccttccttt

SEQ ID NO: 19383 - DNA, 20 bp, Artificial Sequence
  Chr20q_1 Forward Primer
tgaggtggaaacaatgtgga

SEQ ID NO: 19384 - DNA, 20 bp, Artificial Sequence
  Chr20q_1 Forward Primer
tcttgcaggacagggagaac

SEQ ID NO: 19385 - DNA, 22 bp, Artificial Sequence
  Chr20q_1 Forward Primer
agccaagatttttatttgtgcc

SEQ ID NO: 19386 - DNA, 20 bp, Artificial Sequence
  Chr20q_1 Forward Primer
tgcccttaattttccaggtg

SEQ ID NO: 19387 - DNA, 20 bp, Artificial Sequence
  Chr20q_1 Forward Primer
cttgcctttcatgtctgcaa

SEQ ID NO: 19388 - DNA, 20 bp, Artificial Sequence
  Chr20q_1 Forward Primer
acatggaggaaacagggtga

SEQ ID NO: 19389 - DNA, 20 bp, Artificial Sequence
  Chr20q_1 Forward Primer
caggtccacagcattcaaga

SEQ ID NO: 19390 - DNA, 20 bp, Artificial Sequence
  Chr20q_1 Forward Primer
taagagaatggcccagcact

SEQ ID NO: 19391 - DNA, 20 bp, Artificial Sequence
  Chr20q_1 Forward Primer
tctcatggagaggacccatc

SEQ ID NO: 19392 - DNA, 20 bp, Artificial Sequence
  Chr20q_1 Forward Primer
tggttggcaagatgtagcag

SEQ ID NO: 19393 - DNA, 20 bp, Artificial Sequence
  Chr20q_1 Forward Primer
ttgtgtgaacgtcagcttct

SEQ ID NO: 19394 - DNA, 20 bp, Artificial Sequence
  Chr20q_1 Forward Primer
ggctgaagcccattagcata

SEQ ID NO: 19395 - DNA, 20 bp, Artificial Sequence
  Chr20q_1 Forward Primer
aggcgtctcatatcacggag

SEQ ID NO: 19396 - DNA, 20 bp, Artificial Sequence
  Chr20q_1 Forward Primer
cacggttcctggcacttatt

SEQ ID NO: 19397 - DNA, 20 bp, Artificial Sequence
  Chr20q_1 Forward Primer
gtttctctgctcccctttcc

SEQ ID NO: 19398 - DNA, 20 bp, Artificial Sequence
  Chr20q_1 Forward Primer
tggcattgttttccatcatc

SEQ ID NO: 19399 - DNA, 20 bp, Artificial Sequence
  Chr20q_1 Forward Primer
gtggaggaaccaaactgcat

SEQ ID NO: 19400 - DNA, 20 bp, Artificial Sequence
  Chr20q_1 Forward Primer
aggaagtaacccggcaatct

SEQ ID NO: 19401 - DNA, 20 bp, Artificial Sequence
  Chr20q_1 Forward Primer
tgggcttccattttctgtct

SEQ ID NO: 19402 - DNA, 20 bp, Artificial Sequence
  Chr20q_1 Forward Primer
gccttccttccctttgaatc

SEQ ID NO: 19403 - DNA, 20 bp, Artificial Sequence
  Chr20q_1 Forward Primer
tggtactggtttcagggagg

SEQ ID NO: 19404 - DNA, 20 bp, Artificial Sequence
  Chr20q_1 Forward Primer
agtcctggaaggtggtaggg

SEQ ID NO: 19405 - DNA, 20 bp, Artificial Sequence
  Chr20q_1 Forward Primer
gcatcctggaagaagacctg

SEQ ID NO: 19406 - DNA, 20 bp, Artificial Sequence
  Chr20q_1 Forward Primer
actgtgcagagggagcagat

SEQ ID NO: 19407 - DNA, 20 bp, Artificial Sequence
  Chr20q_1 Forward Primer
ccaggaggtgaagtctcagc

SEQ ID NO: 19408 - DNA, 20 bp, Artificial Sequence
  Chr20q_1 Forward Primer
cctgcgtgataaggagaagg

SEQ ID NO: 19409 - DNA, 20 bp, Artificial Sequence
  Chr20q_1 Forward Primer
aggaggagagggtgaaggaa

SEQ ID NO: 19410 - DNA, 20 bp, Artificial Sequence
  Chr20q_1 Forward Primer
gagcatgaggtggagaccag

SEQ ID NO: 19411 - DNA, 20 bp, Artificial Sequence
  Chr20q_1 Forward Primer
caggaccaggatctccgata

SEQ ID NO: 19412 - DNA, 20 bp, Artificial Sequence
  Chr20q_1 Forward Primer
aaggaacaacctggaagcct

SEQ ID NO: 19413 - DNA, 20 bp, Artificial Sequence
  Chr20q_1 Forward Primer
tcactccatggggagtaagg

SEQ ID NO: 19414 - DNA, 20 bp, Artificial Sequence
  Chr20q_1 Forward Primer
aggttgaggaggagcattca

SEQ ID NO: 19415 - DNA, 20 bp, Artificial Sequence
  Chr20q_1 Forward Primer
ttgattggctaagaggtggg

SEQ ID NO: 19416 - DNA, 20 bp, Artificial Sequence
  Chr20q_1 Forward Primer
agagagcaggcaaacaggaa

SEQ ID NO: 19417 - DNA, 20 bp, Artificial Sequence
  Chr20q_1 Forward Primer
catccacctgcgtacacttg

SEQ ID NO: 19418 - DNA, 20 bp, Artificial Sequence
  Chr20q_1 Forward Primer
gggctctgatcctagcttcc

SEQ ID NO: 19419 - DNA, 20 bp, Artificial Sequence
  Chr20q_1 Forward Primer
gagaaggagcggctacacag

SEQ ID NO: 19420 - DNA, 20 bp, Artificial Sequence
  Chr20q_1 Forward Primer
cccaggtgagattcacaggt

SEQ ID NO: 19421 - DNA, 20 bp, Artificial Sequence
  Chr20q_1 Forward Primer
tatacctgcacaggcactgg

SEQ ID NO: 19422 - DNA, 20 bp, Artificial Sequence
  Chr20q_1 Forward Primer
accagaaactcagccctcct

SEQ ID NO: 19423 - DNA, 20 bp, Artificial Sequence
  Chr20q_1 Forward Primer
taggatccctggtgtatggg

SEQ ID NO: 19424 - DNA, 20 bp, Artificial Sequence
  Chr20q_1 Forward Primer
ctgtttatggtggctgagca

SEQ ID NO: 19425 - DNA, 20 bp, Artificial Sequence
  Chr20q_1 Forward Primer
gtgtggctgaactgcagaaa

SEQ ID NO: 19426 - DNA, 20 bp, Artificial Sequence
  Chr20q_1 Forward Primer
ttctaggaggacaggtggga

SEQ ID NO: 19427 - DNA, 23 bp, Artificial Sequence
  Chr20q_1 Forward Primer
ttgttatcagcctcatcaaaatg

SEQ ID NO: 19428 - DNA, 20 bp, Artificial Sequence
  Chr20q_1 Forward Primer
gccaacgagcttcagagaac

SEQ ID NO: 19429 - DNA, 20 bp, Artificial Sequence
  Chr20q_1 Forward Primer
ccaggagcacacagacagaa

SEQ ID NO: 19430 - DNA, 21 bp, Artificial Sequence
  Chr20q_1 Forward Primer
agggacatgtactgcctctca

SEQ ID NO: 19431 - DNA, 20 bp, Artificial Sequence
  Chr20q_1 Forward Primer
aacacacaagacaaagcccc

SEQ ID NO: 19432 - DNA, 20 bp, Artificial Sequence
  Chr20q_1 Forward Primer
cctcaaaaacacagcgttga

SEQ ID NO: 19433 - DNA, 20 bp, Artificial Sequence
  Chr20q_1 Forward Primer
taggccccacataccttctg

SEQ ID NO: 19434 - DNA, 20 bp, Artificial Sequence
  Chr20q_1 Forward Primer
ctttccttgcccagtagcag

SEQ ID NO: 19435 - DNA, 20 bp, Artificial Sequence
  Chr20q_1 Forward Primer
cagccagttctcgtggatgt

SEQ ID NO: 19436 - DNA, 20 bp, Artificial Sequence
  Chr20q_1 Forward Primer
agtgaccatcacctcccaac

SEQ ID NO: 19437 - DNA, 20 bp, Artificial Sequence
  Chr20q_1 Forward Primer
tcacagagtggtgctgcttc

SEQ ID NO: 19438 - DNA, 20 bp, Artificial Sequence
  Chr20q_1 Forward Primer
cctggttccagtaccaagga

SEQ ID NO: 19439 - DNA, 20 bp, Artificial Sequence
  Chr20q_1 Forward Primer
ctcacctcctgccttctgac

SEQ ID NO: 19440 - DNA, 20 bp, Artificial Sequence
  Chr20q_1 Forward Primer
acagggtggacactctgacc

SEQ ID NO: 19441 - DNA, 18 bp, Artificial Sequence
  Chr20q_1 Forward Primer
agggagggggacgagaat

SEQ ID NO: 19442 - DNA, 20 bp, Artificial Sequence
  Chr20q_1 Forward Primer
tcggcttctgctgttgtatg

SEQ ID NO: 19443 - DNA, 20 bp, Artificial Sequence
  Chr20q_1 Forward Primer
tttgcagaatgacccagttg

SEQ ID NO: 19444 - DNA, 20 bp, Artificial Sequence
  Chr20q_1 Forward Primer
ggaagccatggtcacagact

SEQ ID NO: 19445 - DNA, 20 bp, Artificial Sequence
  Chr20q_1 Reverse Primer
gaaaggacatggagacctgg

SEQ ID NO: 19446 - DNA, 20 bp, Artificial Sequence
  Chr20q_1 Reverse Primer
gggaaggaggggagtatctg

SEQ ID NO: 19447 - DNA, 20 bp, Artificial Sequence
  Chr20q_1 Reverse Primer
actgaggtggaatgctgagg

SEQ ID NO: 19448 - DNA, 20 bp, Artificial Sequence
  Chr20q_1 Reverse Primer
tgacccaataatctcccagg

SEQ ID NO: 19449 - DNA, 20 bp, Artificial Sequence
  Chr20q_1 Reverse Primer
tgcaacaagttcacagcctc

SEQ ID NO: 19450 - DNA, 20 bp, Artificial Sequence
  Chr20q_1 Reverse Primer
cccaaaaacctgatgggagt

SEQ ID NO: 19451 - DNA, 20 bp, Artificial Sequence
  Chr20q_1 Reverse Primer
ctccctggaagaagggaatc

SEQ ID NO: 19452 - DNA, 20 bp, Artificial Sequence
  Chr20q_1 Reverse Primer
agacggggagggtgtagaat

SEQ ID NO: 19453 - DNA, 20 bp, Artificial Sequence
  Chr20q_1 Reverse Primer
ttccttgagctcttctccca

SEQ ID NO: 19454 - DNA, 20 bp, Artificial Sequence
  Chr20q_1 Reverse Primer
tgtccatgtgacagagccat

SEQ ID NO: 19455 - DNA, 20 bp, Artificial Sequence
  Chr20q_1 Reverse Primer
gttgtctgcccttctccttg

SEQ ID NO: 19456 - DNA, 20 bp, Artificial Sequence
  Chr20q_1 Reverse Primer
ctgcatgggaacacactttc

SEQ ID NO: 19457 - DNA, 20 bp, Artificial Sequence
  Chr20q_1 Reverse Primer
tgcagtagaaggggaggcta

SEQ ID NO: 19458 - DNA, 20 bp, Artificial Sequence
  Chr20q_1 Reverse Primer
cattccctctcctgcattct

SEQ ID NO: 19459 - DNA, 20 bp, Artificial Sequence
  Chr20q_1 Reverse Primer
tctaacgccaaagcctcatt

SEQ ID NO: 19460 - DNA, 20 bp, Artificial Sequence
  Chr20q_1 Reverse Primer
cttccttccagaggacatgg

SEQ ID NO: 19461 - DNA, 20 bp, Artificial Sequence
  Chr20q_1 Reverse Primer
ccaggtactagatgggctgg

SEQ ID NO: 19462 - DNA, 20 bp, Artificial Sequence
  Chr20q_1 Reverse Primer
atgtccctgagatctgcctg

SEQ ID NO: 19463 - DNA, 20 bp, Artificial Sequence
  Chr20q_1 Reverse Primer
cccctgttatgtggtaggca

SEQ ID NO: 19464 - DNA, 20 bp, Artificial Sequence
  Chr20q_1 Reverse Primer
gagcaagaccctgtgctagg

SEQ ID NO: 19465 - DNA, 20 bp, Artificial Sequence
  Chr20q_1 Reverse Primer
aagctctctctgtgcttggc

SEQ ID NO: 19466 - DNA, 20 bp, Artificial Sequence
  Chr20q_1 Reverse Primer
gggcttcaaacagactgctc

SEQ ID NO: 19467 - DNA, 20 bp, Artificial Sequence
  Chr20q_1 Reverse Primer
aaattctccctctcccctga

SEQ ID NO: 19468 - DNA, 20 bp, Artificial Sequence
  Chr20q_1 Reverse Primer
accaagaggcagcaggtaga

SEQ ID NO: 19469 - DNA, 20 bp, Artificial Sequence
  Chr20q_1 Reverse Primer
gcacaagaatgcatccaaga

SEQ ID NO: 19470 - DNA, 24 bp, Artificial Sequence
  Chr20q_1 Reverse Primer
ttggaattactagacaggacacaa

SEQ ID NO: 19471 - DNA, 20 bp, Artificial Sequence
  Chr20q_1 Reverse Primer
aaaagaaggaggacatgggg

SEQ ID NO: 19472 - DNA, 24 bp, Artificial Sequence
  Chr20q_1 Reverse Primer
gattcctgctagaatcagtgttca

SEQ ID NO: 19473 - DNA, 20 bp, Artificial Sequence
  Chr20q_1 Reverse Primer
attccaggagaaggcagtca

SEQ ID NO: 19474 - DNA, 20 bp, Artificial Sequence
  Chr20q_1 Reverse Primer
ccatgttggtggggtatttc

SEQ ID NO: 19475 - DNA, 20 bp, Artificial Sequence
  Chr20q_1 Reverse Primer
tgtgactgcaaaaagccaaa

SEQ ID NO: 19476 - DNA, 20 bp, Artificial Sequence
  Chr20q_1 Reverse Primer
ggtccgttcttcttccctct

SEQ ID NO: 19477 - DNA, 20 bp, Artificial Sequence
  Chr20q_1 Reverse Primer
taccactggtttgcaagctg

SEQ ID NO: 19478 - DNA, 20 bp, Artificial Sequence
  Chr20q_1 Reverse Primer
atctgctagctccttctgcg

SEQ ID NO: 19479 - DNA, 20 bp, Artificial Sequence
  Chr20q_1 Reverse Primer
aaggtcatctctgtgctgcc

SEQ ID NO: 19480 - DNA, 20 bp, Artificial Sequence
  Chr20q_1 Reverse Primer
tagatttttggcaaggacgg

SEQ ID NO: 19481 - DNA, 20 bp, Artificial Sequence
  Chr20q_1 Reverse Primer
gggaagatgctcctcaccta

SEQ ID NO: 19482 - DNA, 20 bp, Artificial Sequence
  Chr20q_1 Reverse Primer
accatggcagccagatagac

SEQ ID NO: 19483 - DNA, 22 bp, Artificial Sequence
  Chr20q_1 Reverse Primer
tgattaatgtcttccccacaaa

SEQ ID NO: 19484 - DNA, 20 bp, Artificial Sequence
  Chr20q_1 Reverse Primer
ggctccaaccactctttcag

SEQ ID NO: 19485 - DNA, 20 bp, Artificial Sequence
  Chr20q_1 Reverse Primer
cttctcaaattcccacagca

SEQ ID NO: 19486 - DNA, 20 bp, Artificial Sequence
  Chr20q_1 Reverse Primer
gggatgcagagctcataacc

SEQ ID NO: 19487 - DNA, 20 bp, Artificial Sequence
  Chr20q_1 Reverse Primer
atactttgaagccggtgtgc

SEQ ID NO: 19488 - DNA, 20 bp, Artificial Sequence
  Chr20q_1 Reverse Primer
tcaagaccattgaacagcca

SEQ ID NO: 19489 - DNA, 20 bp, Artificial Sequence
  Chr20q_1 Reverse Primer
tatgctggctccttgctatg

SEQ ID NO: 19490 - DNA, 20 bp, Artificial Sequence
  Chr20q_1 Reverse Primer
gaagcggataccctctcctc

SEQ ID NO: 19491 - DNA, 20 bp, Artificial Sequence
  Chr20q_1 Reverse Primer
aggcctgctctcacaaacag

SEQ ID NO: 19492 - DNA, 20 bp, Artificial Sequence
  Chr20q_1 Reverse Primer
tggctgccactatgaaaaga

SEQ ID NO: 19493 - DNA, 20 bp, Artificial Sequence
  Chr20q_1 Reverse Primer
agcaggcactatctgcccta

SEQ ID NO: 19494 - DNA, 20 bp, Artificial Sequence
  Chr20q_1 Reverse Primer
agcccagagtggctgacata

SEQ ID NO: 19495 - DNA, 20 bp, Artificial Sequence
  Chr20q_1 Reverse Primer
ctgctcaaagttagcccagg

SEQ ID NO: 19496 - DNA, 20 bp, Artificial Sequence
  Chr20q_1 Reverse Primer
gtggacctggctcttctcag

SEQ ID NO: 19497 - DNA, 20 bp, Artificial Sequence
  Chr20q_1 Reverse Primer
tatatcctccccagatcccc

SEQ ID NO: 19498 - DNA, 20 bp, Artificial Sequence
  Chr20q_1 Reverse Primer
aggcgactctgtaaggatgc

SEQ ID NO: 19499 - DNA, 20 bp, Artificial Sequence
  Chr20q_1 Reverse Primer
caggacaaggggcaaaaata

SEQ ID NO: 19500 - DNA, 20 bp, Artificial Sequence
  Chr20q_1 Reverse Primer
ccttggctgcctgaagtaac

SEQ ID NO: 19501 - DNA, 20 bp, Artificial Sequence
  Chr20q_1 Reverse Primer
tccagttcctggatttgtcc

SEQ ID NO: 19502 - DNA, 20 bp, Artificial Sequence
  Chr20q_1 Reverse Primer
tgatcagtttttgctggcac

SEQ ID NO: 19503 - DNA, 20 bp, Artificial Sequence
  Chr20q_1 Reverse Primer
cctcgctctctcaaggacag

SEQ ID NO: 19504 - DNA, 20 bp, Artificial Sequence
  Chr20q_1 Reverse Primer
ctccttcagctccccttgtt

SEQ ID NO: 19505 - DNA, 20 bp, Artificial Sequence
  Chr20q_1 Reverse Primer
gccaacagagctttctcctg

SEQ ID NO: 19506 - DNA, 20 bp, Artificial Sequence
  Chr20q_1 Reverse Primer
cgaggagatgctgctctttc

SEQ ID NO: 19507 - DNA, 20 bp, Artificial Sequence
  Chr20q_1 Reverse Primer
tacactctgatgaaggcccc

SEQ ID NO: 19508 - DNA, 20 bp, Artificial Sequence
  Chr20q_1 Reverse Primer
agactgctgacactggcctt

SEQ ID NO: 19509 - DNA, 20 bp, Artificial Sequence
  Chr20q_1 Reverse Primer
tgtgaactctgtgagggcag

SEQ ID NO: 19510 - DNA, 20 bp, Artificial Sequence
  Chr20q_1 Reverse Primer
gatcacatcactcccctgct

SEQ ID NO: 19511 - DNA, 20 bp, Artificial Sequence
  Chr20q_1 Reverse Primer
ggcttcaactccatccttca

SEQ ID NO: 19512 - DNA, 20 bp, Artificial Sequence
  Chr20q_1 Reverse Primer
tcctcatattgcccttcacc

SEQ ID NO: 19513 - DNA, 20 bp, Artificial Sequence
  Chr20q_1 Reverse Primer
gtcaaagcacaagctctccc

SEQ ID NO: 19514 - DNA, 20 bp, Artificial Sequence
  Chr20q_1 Reverse Primer
aatcacaccttgccaacctc

SEQ ID NO: 19515 - DNA, 20 bp, Artificial Sequence
  Chr20q_1 Reverse Primer
acacacagaccaatctggca

SEQ ID NO: 19516 - DNA, 20 bp, Artificial Sequence
  Chr20q_1 Reverse Primer
tggacaagaagaggggtcac

SEQ ID NO: 19517 - DNA, 20 bp, Artificial Sequence
  Chr20q_1 Reverse Primer
taaacctgctgtgtgggtga

SEQ ID NO: 19518 - DNA, 20 bp, Artificial Sequence
  Chr20q_1 Reverse Primer
ggcactggtctgggagtaca

SEQ ID NO: 19519 - DNA, 20 bp, Artificial Sequence
  Chr20q_1 Reverse Primer
tgtgtctgttggcagggata

SEQ ID NO: 19520 - DNA, 20 bp, Artificial Sequence
  Chr20q_1 Reverse Primer
ccatggagacctgacacaaa

SEQ ID NO: 19521 - DNA, 20 bp, Artificial Sequence
  Chr20q_1 Reverse Primer
tcatgctttcttccccactc

SEQ ID NO: 19522 - DNA, 20 bp, Artificial Sequence
  Chr20q_1 Reverse Primer
cctaagaggcaggaaggctc

SEQ ID NO: 19523 - DNA, 21 bp, Artificial Sequence
  Chr20q_1 Reverse Primer
cacgaatctcagaaacaggct

SEQ ID NO: 19524 - DNA, 20 bp, Artificial Sequence
  Chr20q_1 Reverse Primer
gagtgtgagaggctgtggtg

SEQ ID NO: 19525 - DNA, 20 bp, Artificial Sequence
  Chr20q_1 Reverse Primer
ggtgattccatagggagcaa

SEQ ID NO: 19526 - DNA, 20 bp, Artificial Sequence
  Chr20q_1 Reverse Primer
tgcatgctacctcaacagga

SEQ ID NO: 19527 - DNA, 20 bp, Artificial Sequence
  Chr20q_1 Reverse Primer
cttctcactgtgtgcttggc

SEQ ID NO: 19528 - DNA, 20 bp, Artificial Sequence
  Chr20q_1 Reverse Primer
ccagtccatgggtgagaagt

SEQ ID NO: 19529 - DNA, 20 bp, Artificial Sequence
  Chr20q_1 Reverse Primer
gccctgctctgaatatctgg

SEQ ID NO: 19530 - DNA, 20 bp, Artificial Sequence
  Chr20q_1 Reverse Primer
ccacatgtgacaaggtcagg

SEQ ID NO: 19531 - DNA, 20 bp, Artificial Sequence
  Chr20q_1 Reverse Primer
aaacaagaacattgcccagc

SEQ ID NO: 19532 - DNA, 20 bp, Artificial Sequence
  Chr20q_1 Reverse Primer
tggcactttggtgtcaacat

SEQ ID NO: 19533 - DNA, 20 bp, Artificial Sequence
  Chr20q_1 Reverse Primer
gcaccaatgctaggacacct

SEQ ID NO: 19534 - DNA, 20 bp, Artificial Sequence
  Chr20q_1 Reverse Primer
ctacaaagcctgccttcacc

SEQ ID NO: 19535 - DNA, 20 bp, Artificial Sequence
  Chr20q_1 Reverse Primer
tgtttttgcccttcatcctc

SEQ ID NO: 19536 - DNA, 20 bp, Artificial Sequence
  Chr20q_1 Reverse Primer
tgtgctgggaataggggtta

SEQ ID NO: 19537 - DNA, 22 bp, Artificial Sequence
  Chr20q_1 Reverse Primer
agaatgtgagactactcctggc

SEQ ID NO: 19538 - DNA, 20 bp, Artificial Sequence
  Chr20q_1 Reverse Primer
cttctcagagctccctgtgg

SEQ ID NO: 19539 - DNA, 20 bp, Artificial Sequence
  Chr20q_1 Reverse Primer
gccgtctgctcagaggtcta

SEQ ID NO: 19540 - DNA, 20 bp, Artificial Sequence
  Chr20q_1 Reverse Primer
atcgaccccttaatcaaccc

SEQ ID NO: 19541 - DNA, 26 bp, Artificial Sequence
  Chr20q_2 Forward Primer
tcccatctaatctaataatagcctca

SEQ ID NO: 19542 - DNA, 20 bp, Artificial Sequence
  Chr20q_2 Forward Primer
gttgtggaaaatcagggctc

SEQ ID NO: 19543 - DNA, 20 bp, Artificial Sequence
  Chr20q_2 Forward Primer
tgttctgacagccagtttcc

SEQ ID NO: 19544 - DNA, 21 bp, Artificial Sequence
  Chr20q_2 Forward Primer
ttcttcattatgccccagttg

SEQ ID NO: 19545 - DNA, 19 bp, Artificial Sequence
  Chr20q_2 Forward Primer
aagcaggctggatttggtc

SEQ ID NO: 19546 - DNA, 20 bp, Artificial Sequence
  Chr20q_2 Forward Primer
cctgtttctcccagttttgg

SEQ ID NO: 19547 - DNA, 20 bp, Artificial Sequence
  Chr20q_2 Forward Primer
aattttagggtccactgccc

SEQ ID NO: 19548 - DNA, 20 bp, Artificial Sequence
  Chr20q_2 Forward Primer
gttggacacaggggagctaa

SEQ ID NO: 19549 - DNA, 20 bp, Artificial Sequence
  Chr20q_2 Forward Primer
atcctcagtccctctcacca

SEQ ID NO: 19550 - DNA, 20 bp, Artificial Sequence
  Chr20q_2 Forward Primer
cttgggatctgtcagggaaa

SEQ ID NO: 19551 - DNA, 20 bp, Artificial Sequence
  Chr20q_2 Forward Primer
ccatccctcagtaccctcaa

SEQ ID NO: 19552 - DNA, 20 bp, Artificial Sequence
  Chr20q_2 Forward Primer
ggagaaatgcaaaagtccca

SEQ ID NO: 19553 - DNA, 20 bp, Artificial Sequence
  Chr20q_2 Forward Primer
agagtctgcccaagagcaag

SEQ ID NO: 19554 - DNA, 20 bp, Artificial Sequence
  Chr20q_2 Forward Primer
agcaatggtgcccagattac

SEQ ID NO: 19555 - DNA, 20 bp, Artificial Sequence
  Chr20q_2 Forward Primer
gaacaaaggcccatagacca

SEQ ID NO: 19556 - DNA, 20 bp, Artificial Sequence
  Chr20q_2 Forward Primer
gaaccctaatgcccctgtct

SEQ ID NO: 19557 - DNA, 21 bp, Artificial Sequence
  Chr20q_2 Forward Primer
ggtgctgaacttcctgttagc

SEQ ID NO: 19558 - DNA, 20 bp, Artificial Sequence
  Chr20q_2 Forward Primer
atcagaggttgccaggagaa

SEQ ID NO: 19559 - DNA, 20 bp, Artificial Sequence
  Chr20q_2 Forward Primer
tccaccagaatacactggca

SEQ ID NO: 19560 - DNA, 20 bp, Artificial Sequence
  Chr20q_2 Forward Primer
gggttttgtgtaggggtgac

SEQ ID NO: 19561 - DNA, 20 bp, Artificial Sequence
  Chr20q_2 Forward Primer
atccaccttcacctcactgc

SEQ ID NO: 19562 - DNA, 20 bp, Artificial Sequence
  Chr20q_2 Forward Primer
agcacacacacctagcaacg

SEQ ID NO: 19563 - DNA, 20 bp, Artificial Sequence
  Chr20q_2 Forward Primer
atttgtcagctgggtgatgc

SEQ ID NO: 19564 - DNA, 21 bp, Artificial Sequence
  Chr20q_2 Forward Primer
gagtgcttacaatgggtcagg

SEQ ID NO: 19565 - DNA, 20 bp, Artificial Sequence
  Chr20q_2 Forward Primer
ccttttgtctcaggctccag

SEQ ID NO: 19566 - DNA, 20 bp, Artificial Sequence
  Chr20q_2 Forward Primer
ccataccctggtgagaagga

SEQ ID NO: 19567 - DNA, 20 bp, Artificial Sequence
  Chr20q_2 Forward Primer
catctcaagccacagagcct

SEQ ID NO: 19568 - DNA, 20 bp, Artificial Sequence
  Chr20q_2 Forward Primer
cagtaaggggcagcaggtag

SEQ ID NO: 19569 - DNA, 20 bp, Artificial Sequence
  Chr20q_2 Forward Primer
aggcctggagatatgagcct

SEQ ID NO: 19570 - DNA, 20 bp, Artificial Sequence
  Chr20q_2 Forward Primer
ggaaggcagcaagtcttgaa

SEQ ID NO: 19571 - DNA, 20 bp, Artificial Sequence
  Chr20q_2 Forward Primer
catccagatgacaggtgcag

SEQ ID NO: 19572 - DNA, 22 bp, Artificial Sequence
  Chr20q_2 Forward Primer
tggggttttgtctgtatttgtg

SEQ ID NO: 19573 - DNA, 20 bp, Artificial Sequence
  Chr20q_2 Forward Primer
tgaatctcaggacccaaagc

SEQ ID NO: 19574 - DNA, 20 bp, Artificial Sequence
  Chr20q_2 Forward Primer
gacatgcagttcccaggttt

SEQ ID NO: 19575 - DNA, 20 bp, Artificial Sequence
  Chr20q_2 Forward Primer
ggcccagacgctgtgtatta

SEQ ID NO: 19576 - DNA, 20 bp, Artificial Sequence
  Chr20q_2 Forward Primer
aagccagagagaggggaaag

SEQ ID NO: 19577 - DNA, 20 bp, Artificial Sequence
  Chr20q_2 Forward Primer
aaaaatcctgcctcacatgc

SEQ ID NO: 19578 - DNA, 20 bp, Artificial Sequence
  Chr20q_2 Forward Primer
gatggagtttggtcaggagc

SEQ ID NO: 19579 - DNA, 20 bp, Artificial Sequence
  Chr20q_2 Forward Primer
gcaacagactgtgggacttg

SEQ ID NO: 19580 - DNA, 20 bp, Artificial Sequence
  Chr20q_2 Forward Primer
gtcaatgccattaggaagca

SEQ ID NO: 19581 - DNA, 20 bp, Artificial Sequence
  Chr20q_2 Forward Primer
ggttttgagagagctgggtg

SEQ ID NO: 19582 - DNA, 20 bp, Artificial Sequence
  Chr20q_2 Forward Primer
ggacatttgcatccctcatt

SEQ ID NO: 19583 - DNA, 20 bp, Artificial Sequence
  Chr20q_2 Forward Primer
cctggatatttccaagccct

SEQ ID NO: 19584 - DNA, 20 bp, Artificial Sequence
  Chr20q_2 Forward Primer
aggaattcaggcagcaaatg

SEQ ID NO: 19585 - DNA, 24 bp, Artificial Sequence
  Chr20q_2 Forward Primer
ttctcaggcttaaggataacacaa

SEQ ID NO: 19586 - DNA, 20 bp, Artificial Sequence
  Chr20q_2 Forward Primer
aaaaggtgtgaagggagtgc

SEQ ID NO: 19587 - DNA, 27 bp, Artificial Sequence
  Chr20q_2 Forward Primer
tggataccaaacactatgtaccttaat

SEQ ID NO: 19588 - DNA, 20 bp, Artificial Sequence
  Chr20q_2 Forward Primer
aagtgatcagtggacctcgg

SEQ ID NO: 19589 - DNA, 21 bp, Artificial Sequence
  Chr20q_2 Forward Primer
ggttcagcacttgacataggc

SEQ ID NO: 19590 - DNA, 20 bp, Artificial Sequence
  Chr20q_2 Forward Primer
tttgcattagggtcgaaacc

SEQ ID NO: 19591 - DNA, 20 bp, Artificial Sequence
  Chr20q_2 Forward Primer
ttcaggcctcaacaaacaca

SEQ ID NO: 19592 - DNA, 20 bp, Artificial Sequence
  Chr20q_2 Forward Primer
agagcacctcgttggtctgt

SEQ ID NO: 19593 - DNA, 21 bp, Artificial Sequence
  Chr20q_2 Forward Primer
gcatctgggatttcctacctc

SEQ ID NO: 19594 - DNA, 23 bp, Artificial Sequence
  Chr20q_2 Forward Primer
agcatctcatggacaactctctc

SEQ ID NO: 19595 - DNA, 20 bp, Artificial Sequence
  Chr20q_2 Forward Primer
ttaaatgattcctgcagccc

SEQ ID NO: 19596 - DNA, 21 bp, Artificial Sequence
  Chr20q_2 Forward Primer
cactgctttcaaaccttttcg

SEQ ID NO: 19597 - DNA, 25 bp, Artificial Sequence
  Chr20q_2 Forward Primer
tgttctccctaacttttaaactcaa

SEQ ID NO: 19598 - DNA, 20 bp, Artificial Sequence
  Chr20q_2 Forward Primer
caagtgtccagcatctccaa

SEQ ID NO: 19599 - DNA, 20 bp, Artificial Sequence
  Chr20q_2 Forward Primer
cctgaatcacatcaatgcca

SEQ ID NO: 19600 - DNA, 21 bp, Artificial Sequence
  Chr20q_2 Forward Primer
cccagattgagaaagctgaca

SEQ ID NO: 19601 - DNA, 20 bp, Artificial Sequence
  Chr20q_2 Forward Primer
aggctcaaaacccttgtcct

SEQ ID NO: 19602 - DNA, 20 bp, Artificial Sequence
  Chr20q_2 Forward Primer
tccagctgtctgcttcttca

SEQ ID NO: 19603 - DNA, 20 bp, Artificial Sequence
  Chr20q_2 Forward Primer
ctgcttctggatgcaaactg

SEQ ID NO: 19604 - DNA, 20 bp, Artificial Sequence
  Chr20q_2 Forward Primer
aatgtctgctggggattgtc

SEQ ID NO: 19605 - DNA, 20 bp, Artificial Sequence
  Chr20q_2 Forward Primer
atgcctgtgtgtttgctgtt

SEQ ID NO: 19606 - DNA, 20 bp, Artificial Sequence
  Chr20q_2 Forward Primer
ccagaagggcagacaacatt

SEQ ID NO: 19607 - DNA, 21 bp, Artificial Sequence
  Chr20q_2 Forward Primer
tcagacactcgtcattccaca

SEQ ID NO: 19608 - DNA, 20 bp, Artificial Sequence
  Chr20q_2 Forward Primer
cctctggcttgatttctcca

SEQ ID NO: 19609 - DNA, 20 bp, Artificial Sequence
  Chr20q_2 Forward Primer
aaatgcttgcctcctctcct

SEQ ID NO: 19610 - DNA, 20 bp, Artificial Sequence
  Chr20q_2 Forward Primer
aaggccaagattccctgagt

SEQ ID NO: 19611 - DNA, 20 bp, Artificial Sequence
  Chr20q_2 Forward Primer
ttcagggctttggtgtatca

SEQ ID NO: 19612 - DNA, 21 bp, Artificial Sequence
  Chr20q_2 Forward Primer
ttgttggaaaggagtcacagg

SEQ ID NO: 19613 - DNA, 20 bp, Artificial Sequence
  Chr20q_2 Forward Primer
cattcagctggagagagcct

SEQ ID NO: 19614 - DNA, 20 bp, Artificial Sequence
  Chr20q_2 Forward Primer
gtgttaggacccctgcaaag

SEQ ID NO: 19615 - DNA, 20 bp, Artificial Sequence
  Chr20q_2 Forward Primer
aactgaggctgcaatggaat

SEQ ID NO: 19616 - DNA, 20 bp, Artificial Sequence
  Chr20q_2 Forward Primer
gttttgctttttcaacccca

SEQ ID NO: 19617 - DNA, 20 bp, Artificial Sequence
  Chr20q_2 Forward Primer
atatatcctgccctgggatg

SEQ ID NO: 19618 - DNA, 20 bp, Artificial Sequence
  Chr20q_2 Forward Primer
atcaaaggctcaacacaggg

SEQ ID NO: 19619 - DNA, 20 bp, Artificial Sequence
  Chr20q_2 Forward Primer
tttgggactggagggtaatg

SEQ ID NO: 19620 - DNA, 21 bp, Artificial Sequence
  Chr20q_2 Forward Primer
tcctgccttttgaaaactgaa

SEQ ID NO: 19621 - DNA, 20 bp, Artificial Sequence
  Chr20q_2 Forward Primer
gccctaactagctttggcct

SEQ ID NO: 19622 - DNA, 21 bp, Artificial Sequence
  Chr20q_2 Forward Primer
gggatagtgtgatggatgtgc

SEQ ID NO: 19623 - DNA, 19 bp, Artificial Sequence
  Chr20q_2 Forward Primer
gcccttgggaaggattttt

SEQ ID NO: 19624 - DNA, 23 bp, Artificial Sequence
  Chr20q_2 Forward Primer
tcatcttactcttccagctgctt

SEQ ID NO: 19625 - DNA, 20 bp, Artificial Sequence
  Chr20q_2 Forward Primer
gaggcagctcttgcttatgg

SEQ ID NO: 19626 - DNA, 20 bp, Artificial Sequence
  Chr20q_2 Forward Primer
cctgagggttgcataacgat

SEQ ID NO: 19627 - DNA, 20 bp, Artificial Sequence
  Chr20q_2 Forward Primer
caaaagcactttgggaaggt

SEQ ID NO: 19628 - DNA, 20 bp, Artificial Sequence
  Chr20q_2 Forward Primer
aggaatcaaaccccagacct

SEQ ID NO: 19629 - DNA, 20 bp, Artificial Sequence
  Chr20q_2 Forward Primer
atcgtttcctagggagaggg

SEQ ID NO: 19630 - DNA, 20 bp, Artificial Sequence
  Chr20q_2 Forward Primer
caccgttcccaggtgatagt

SEQ ID NO: 19631 - DNA, 20 bp, Artificial Sequence
  Chr20q_2 Forward Primer
attcaggaacccatgcaaag

SEQ ID NO: 19632 - DNA, 20 bp, Artificial Sequence
  Chr20q_2 Forward Primer
tggtgtggacaaaagcagaa

SEQ ID NO: 19633 - DNA, 20 bp, Artificial Sequence
  Chr20q_2 Forward Primer
gcagtagattggcagcacat

SEQ ID NO: 19634 - DNA, 20 bp, Artificial Sequence
  Chr20q_2 Forward Primer
aggactcctgcctcctcaat

SEQ ID NO: 19635 - DNA, 20 bp, Artificial Sequence
  Chr20q_2 Forward Primer
ccccaagggatctaaccaat

SEQ ID NO: 19636 - DNA, 20 bp, Artificial Sequence
  Chr20q_2 Forward Primer
cagagaaagccccaaatgaa

SEQ ID NO: 19637 - DNA, 20 bp, Artificial Sequence
  Chr20q_2 Reverse Primer
aatgtgcctgcctctcaatc

SEQ ID NO: 19638 - DNA, 20 bp, Artificial Sequence
  Chr20q_2 Reverse Primer
ccaggcacgttccactattt

SEQ ID NO: 19639 - DNA, 20 bp, Artificial Sequence
  Chr20q_2 Reverse Primer
aaagctgaaggaactgaggc

SEQ ID NO: 19640 - DNA, 20 bp, Artificial Sequence
  Chr20q_2 Reverse Primer
gggggctgtgtagaaactca

SEQ ID NO: 19641 - DNA, 20 bp, Artificial Sequence
  Chr20q_2 Reverse Primer
tcatttaacccccagcactc

SEQ ID NO: 19642 - DNA, 20 bp, Artificial Sequence
  Chr20q_2 Reverse Primer
attctcagggcccacctcta

SEQ ID NO: 19643 - DNA, 20 bp, Artificial Sequence
  Chr20q_2 Reverse Primer
ttccttcccctcctggtact

SEQ ID NO: 19644 - DNA, 20 bp, Artificial Sequence
  Chr20q_2 Reverse Primer
ggaaatgcaaaaccctgaaa

SEQ ID NO: 19645 - DNA, 21 bp, Artificial Sequence
  Chr20q_2 Reverse Primer
aaagtgatcatttggtccagg

SEQ ID NO: 19646 - DNA, 20 bp, Artificial Sequence
  Chr20q_2 Reverse Primer
accaatgcttggctatcctg

SEQ ID NO: 19647 - DNA, 20 bp, Artificial Sequence
  Chr20q_2 Reverse Primer
atccatggccagtcagacat

SEQ ID NO: 19648 - DNA, 20 bp, Artificial Sequence
  Chr20q_2 Reverse Primer
atggaaatggtctctgccac

SEQ ID NO: 19649 - DNA, 20 bp, Artificial Sequence
  Chr20q_2 Reverse Primer
gtgggttgaatgaatgcctc

SEQ ID NO: 19650 - DNA, 20 bp, Artificial Sequence
  Chr20q_2 Reverse Primer
cttcacccatcaccccatac

SEQ ID NO: 19651 - DNA, 20 bp, Artificial Sequence
  Chr20q_2 Reverse Primer
acacagtccggatgcaagtc

SEQ ID NO: 19652 - DNA, 20 bp, Artificial Sequence
  Chr20q_2 Reverse Primer
ccaggaccccaagagttgta

SEQ ID NO: 19653 - DNA, 19 bp, Artificial Sequence
  Chr20q_2 Reverse Primer
agcaagatctctccgtggg

SEQ ID NO: 19654 - DNA, 20 bp, Artificial Sequence
  Chr20q_2 Reverse Primer
catatggcagcctggtaggt

SEQ ID NO: 19655 - DNA, 20 bp, Artificial Sequence
  Chr20q_2 Reverse Primer
agctctgttgatctggtccc

SEQ ID NO: 19656 - DNA, 24 bp, Artificial Sequence
  Chr20q_2 Reverse Primer
tgccaaaaacatattttggaataa

SEQ ID NO: 19657 - DNA, 20 bp, Artificial Sequence
  Chr20q_2 Reverse Primer
aattttccagtggctacccc

SEQ ID NO: 19658 - DNA, 20 bp, Artificial Sequence
  Chr20q_2 Reverse Primer
tattcaacccactgtgctgg

SEQ ID NO: 19659 - DNA, 20 bp, Artificial Sequence
  Chr20q_2 Reverse Primer
aagtccttcaagctccgtga

SEQ ID NO: 19660 - DNA, 21 bp, Artificial Sequence
  Chr20q_2 Reverse Primer
tgaggttttggtgtctccttt

SEQ ID NO: 19661 - DNA, 20 bp, Artificial Sequence
  Chr20q_2 Reverse Primer
acacctccttcccagaacct

SEQ ID NO: 19662 - DNA, 20 bp, Artificial Sequence
  Chr20q_2 Reverse Primer
tgtagagtggcgtgctcatc

SEQ ID NO: 19663 - DNA, 20 bp, Artificial Sequence
  Chr20q_2 Reverse Primer
gagctatcaactcgccctgt

SEQ ID NO: 19664 - DNA, 20 bp, Artificial Sequence
  Chr20q_2 Reverse Primer
acctgggtatctggggaaac

SEQ ID NO: 19665 - DNA, 20 bp, Artificial Sequence
  Chr20q_2 Reverse Primer
gccaatagccaagcaggtta

SEQ ID NO: 19666 - DNA, 20 bp, Artificial Sequence
  Chr20q_2 Reverse Primer
tattttcaaagcctgggcac

SEQ ID NO: 19667 - DNA, 20 bp, Artificial Sequence
  Chr20q_2 Reverse Primer
ccttgtccagcgaagacaat

SEQ ID NO: 19668 - DNA, 20 bp, Artificial Sequence
  Chr20q_2 Reverse Primer
ttgcaggctgatggactatg

SEQ ID NO: 19669 - DNA, 20 bp, Artificial Sequence
  Chr20q_2 Reverse Primer
gtggtcatagattgggggtg

SEQ ID NO: 19670 - DNA, 20 bp, Artificial Sequence
  Chr20q_2 Reverse Primer
ggtcagggcagaagacagag

SEQ ID NO: 19671 - DNA, 20 bp, Artificial Sequence
  Chr20q_2 Reverse Primer
aagaggaggaagggagggtt

SEQ ID NO: 19672 - DNA, 20 bp, Artificial Sequence
  Chr20q_2 Reverse Primer
atgcatctggattttctggg

SEQ ID NO: 19673 - DNA, 20 bp, Artificial Sequence
  Chr20q_2 Reverse Primer
ggtcccttaccccatattga

SEQ ID NO: 19674 - DNA, 20 bp, Artificial Sequence
  Chr20q_2 Reverse Primer
aacacttctgagaggggcac

SEQ ID NO: 19675 - DNA, 20 bp, Artificial Sequence
  Chr20q_2 Reverse Primer
gggtgctgaagggaagattt

SEQ ID NO: 19676 - DNA, 20 bp, Artificial Sequence
  Chr20q_2 Reverse Primer
tccagggacaaaacatttcc

SEQ ID NO: 19677 - DNA, 20 bp, Artificial Sequence
  Chr20q_2 Reverse Primer
agcaaagttgggcaaatcac

SEQ ID NO: 19678 - DNA, 20 bp, Artificial Sequence
  Chr20q_2 Reverse Primer
tgtgctctgactcctggttg

SEQ ID NO: 19679 - DNA, 21 bp, Artificial Sequence
  Chr20q_2 Reverse Primer
tgaaacaaccacacacaacaa

SEQ ID NO: 19680 - DNA, 20 bp, Artificial Sequence
  Chr20q_2 Reverse Primer
agtttccattgtccgggttt

SEQ ID NO: 19681 - DNA, 21 bp, Artificial Sequence
  Chr20q_2 Reverse Primer
catttgagagaaggttgctgc

SEQ ID NO: 19682 - DNA, 21 bp, Artificial Sequence
  Chr20q_2 Reverse Primer
ctccaccagttgtgtgacttg

SEQ ID NO: 19683 - DNA, 23 bp, Artificial Sequence
  Chr20q_2 Reverse Primer
ggttttaatgcattctctgatga

SEQ ID NO: 19684 - DNA, 20 bp, Artificial Sequence
  Chr20q_2 Reverse Primer
cttgagctcattttggggaa

SEQ ID NO: 19685 - DNA, 20 bp, Artificial Sequence
  Chr20q_2 Reverse Primer
aatgtttcctcattggtggc

SEQ ID NO: 19686 - DNA, 23 bp, Artificial Sequence
  Chr20q_2 Reverse Primer
tgaccttctctttcagttcatgc

SEQ ID NO: 19687 - DNA, 20 bp, Artificial Sequence
  Chr20q_2 Reverse Primer
tgtgggctcatctctaaccc

SEQ ID NO: 19688 - DNA, 20 bp, Artificial Sequence
  Chr20q_2 Reverse Primer
cccccactgtgttcttgaat

SEQ ID NO: 19689 - DNA, 20 bp, Artificial Sequence
  Chr20q_2 Reverse Primer
tgccattgtcatgtcttcca

SEQ ID NO: 19690 - DNA, 20 bp, Artificial Sequence
  Chr20q_2 Reverse Primer
catgaggcagaatgagcctt

SEQ ID NO: 19691 - DNA, 20 bp, Artificial Sequence
  Chr20q_2 Reverse Primer
ggtgacatgaaaaacctggg

SEQ ID NO: 19692 - DNA, 20 bp, Artificial Sequence
  Chr20q_2 Reverse Primer
gacagcagaagaagcaagcc

SEQ ID NO: 19693 - DNA, 25 bp, Artificial Sequence
  Chr20q_2 Reverse Primer
ccattttgtttttcttttcttctca

SEQ ID NO: 19694 - DNA, 20 bp, Artificial Sequence
  Chr20q_2 Reverse Primer
cttctgatccttctgccagg

SEQ ID NO: 19695 - DNA, 20 bp, Artificial Sequence
  Chr20q_2 Reverse Primer
cagtcggagtcccatgaaat

SEQ ID NO: 19696 - DNA, 20 bp, Artificial Sequence
  Chr20q_2 Reverse Primer
gcatggaggagatggagatg

SEQ ID NO: 19697 - DNA, 25 bp, Artificial Sequence
  Chr20q_2 Reverse Primer
cgtatgtgaaaaatctctagctggt

SEQ ID NO: 19698 - DNA, 20 bp, Artificial Sequence
  Chr20q_2 Reverse Primer
aattgacaaagccaagccaa

SEQ ID NO: 19699 - DNA, 20 bp, Artificial Sequence
  Chr20q_2 Reverse Primer
agggtagaagcctgtgtcca

SEQ ID NO: 19700 - DNA, 20 bp, Artificial Sequence
  Chr20q_2 Reverse Primer
tggctgcagaagattgaatg

SEQ ID NO: 19701 - DNA, 25 bp, Artificial Sequence
  Chr20q_2 Reverse Primer
tcgtgaattagaagaagtctgatga

SEQ ID NO: 19702 - DNA, 20 bp, Artificial Sequence
  Chr20q_2 Reverse Primer
gtgctgggccagaatacaac

SEQ ID NO: 19703 - DNA, 25 bp, Artificial Sequence
  Chr20q_2 Reverse Primer
ctcacatgtcatgctaagaagtttg

SEQ ID NO: 19704 - DNA, 20 bp, Artificial Sequence
  Chr20q_2 Reverse Primer
ggacacagcagtgtgcagtt

SEQ ID NO: 19705 - DNA, 22 bp, Artificial Sequence
  Chr20q_2 Reverse Primer
ttgagctatgaaatgaaaggga

SEQ ID NO: 19706 - DNA, 20 bp, Artificial Sequence
  Chr20q_2 Reverse Primer
gtgatcacagcccaaagacc

SEQ ID NO: 19707 - DNA, 21 bp, Artificial Sequence
  Chr20q_2 Reverse Primer
tctgagcaaatgaatggatga

SEQ ID NO: 19708 - DNA, 20 bp, Artificial Sequence
  Chr20q_2 Reverse Primer
atatttggtccctgcccaac

SEQ ID NO: 19709 - DNA, 20 bp, Artificial Sequence
  Chr20q_2 Reverse Primer
tccttcagcagtggcctagt

SEQ ID NO: 19710 - DNA, 20 bp, Artificial Sequence
  Chr20q_2 Reverse Primer
ccattcggctcaaagctaag

SEQ ID NO: 19711 - DNA, 20 bp, Artificial Sequence
  Chr20q_2 Reverse Primer
ggaccaagacagtgtcacga

SEQ ID NO: 19712 - DNA, 20 bp, Artificial Sequence
  Chr20q_2 Reverse Primer
tgtggagggaggtagtgagg

SEQ ID NO: 19713 - DNA, 20 bp, Artificial Sequence
  Chr20q_2 Reverse Primer
gtaagcttttgtgtgcctgg

SEQ ID NO: 19714 - DNA, 20 bp, Artificial Sequence
  Chr20q_2 Reverse Primer
gtgaggatgggaggaactga

SEQ ID NO: 19715 - DNA, 20 bp, Artificial Sequence
  Chr20q_2 Reverse Primer
ggcataggatggaggtgaga

SEQ ID NO: 19716 - DNA, 21 bp, Artificial Sequence
  Chr20q_2 Reverse Primer
cagccattcctgatcattgtt

SEQ ID NO: 19717 - DNA, 20 bp, Artificial Sequence
  Chr20q_2 Reverse Primer
gacagctgcaccccactact

SEQ ID NO: 19718 - DNA, 20 bp, Artificial Sequence
  Chr20q_2 Reverse Primer
tatgagggtccctgaacctg

SEQ ID NO: 19719 - DNA, 20 bp, Artificial Sequence
  Chr20q_2 Reverse Primer
ccctgcagaagtgcactaaa

SEQ ID NO: 19720 - DNA, 21 bp, Artificial Sequence
  Chr20q_2 Reverse Primer
aagcaaatccctttcagagga

SEQ ID NO: 19721 - DNA, 20 bp, Artificial Sequence
  Chr20q_2 Reverse Primer
ttgcattgggtggacaaata

SEQ ID NO: 19722 - DNA, 20 bp, Artificial Sequence
  Chr20q_2 Reverse Primer
ttgtcaatgcaaaagcgaag

SEQ ID NO: 19723 - DNA, 20 bp, Artificial Sequence
  Chr20q_2 Reverse Primer
tgagcttcagatgtcatggg

SEQ ID NO: 19724 - DNA, 20 bp, Artificial Sequence
  Chr20q_2 Reverse Primer
tgtctccataatgcttggca

SEQ ID NO: 19725 - DNA, 20 bp, Artificial Sequence
  Chr20q_2 Reverse Primer
agggaacggtgtcagttttg

SEQ ID NO: 19726 - DNA, 20 bp, Artificial Sequence
  Chr20q_2 Reverse Primer
ctgtagccaagggcagaaac

SEQ ID NO: 19727 - DNA, 20 bp, Artificial Sequence
  Chr20q_2 Reverse Primer
tgaaaagagcatcctcaggg

SEQ ID NO: 19728 - DNA, 20 bp, Artificial Sequence
  Chr20q_2 Reverse Primer
ccaatggcttaactaccccc

SEQ ID NO: 19729 - DNA, 20 bp, Artificial Sequence
  Chr20q_2 Reverse Primer
cattgaggctccaacatcag

SEQ ID NO: 19730 - DNA, 20 bp, Artificial Sequence
  Chr20q_2 Reverse Primer
aacaaatggcatccacgatt

SEQ ID NO: 19731 - DNA, 20 bp, Artificial Sequence
  Chr20q_2 Reverse Primer
ttgggagaagaggcagaaaa

SEQ ID NO: 19732 - DNA, 20 bp, Artificial Sequence
  Chr20q_2 Reverse Primer
gcatgaggaagtcttgagcc

SEQ ID NO: 19733 - DNA, 20 bp, Artificial Sequence
  Chr20q_3 Forward Primer
ctctcagtggctccaaggaa

SEQ ID NO: 19734 - DNA, 20 bp, Artificial Sequence
  Chr20q_3 Forward Primer
ggctacagaaaagccacagc

SEQ ID NO: 19735 - DNA, 20 bp, Artificial Sequence
  Chr20q_3 Forward Primer
cttctttgccactgccctac

SEQ ID NO: 19736 - DNA, 20 bp, Artificial Sequence
  Chr20q_3 Forward Primer
ggaaaatcactgggttccct

SEQ ID NO: 19737 - DNA, 20 bp, Artificial Sequence
  Chr20q_3 Forward Primer
agacaaggcaagtgagagcc

SEQ ID NO: 19738 - DNA, 19 bp, Artificial Sequence
  Chr20q_3 Forward Primer
ctcgcacaggcagagtgtt

SEQ ID NO: 19739 - DNA, 20 bp, Artificial Sequence
  Chr20q_3 Forward Primer
taggaagtggaggagctgga

SEQ ID NO: 19740 - DNA, 20 bp, Artificial Sequence
  Chr20q_3 Forward Primer
gagcttcatcctgcttctcg

SEQ ID NO: 19741 - DNA, 20 bp, Artificial Sequence
  Chr20q_3 Forward Primer
actcctagccaccatccctt

SEQ ID NO: 19742 - DNA, 20 bp, Artificial Sequence
  Chr20q_3 Forward Primer
gctattctggctgccaagtc

SEQ ID NO: 19743 - DNA, 19 bp, Artificial Sequence
  Chr20q_3 Forward Primer
ttgggcctttgcttcagat

SEQ ID NO: 19744 - DNA, 20 bp, Artificial Sequence
  Chr20q_3 Forward Primer
tgtgcaccctgtgttacctg

SEQ ID NO: 19745 - DNA, 20 bp, Artificial Sequence
  Chr20q_3 Forward Primer
caccgtcatcactaccatcg

SEQ ID NO: 19746 - DNA, 20 bp, Artificial Sequence
  Chr20q_3 Forward Primer
agtgtcgctaatcggcctta

SEQ ID NO: 19747 - DNA, 20 bp, Artificial Sequence
  Chr20q_3 Forward Primer
gccatgactaccatctggct

SEQ ID NO: 19748 - DNA, 20 bp, Artificial Sequence
  Chr20q_3 Forward Primer
tattgccacctgccttctct

SEQ ID NO: 19749 - DNA, 20 bp, Artificial Sequence
  Chr20q_3 Forward Primer
tgtggttttggcctcttacc

SEQ ID NO: 19750 - DNA, 20 bp, Artificial Sequence
  Chr20q_3 Forward Primer
gtgatggggactacaccacc

SEQ ID NO: 19751 - DNA, 20 bp, Artificial Sequence
  Chr20q_3 Forward Primer
tgggtcaaatacagttgcca

SEQ ID NO: 19752 - DNA, 20 bp, Artificial Sequence
  Chr20q_3 Forward Primer
acgacccaagtgcacacata

SEQ ID NO: 19753 - DNA, 20 bp, Artificial Sequence
  Chr20q_3 Forward Primer
ttccaggactcaagattgcc

SEQ ID NO: 19754 - DNA, 20 bp, Artificial Sequence
  Chr20q_3 Forward Primer
caacccccaaaattctacca

SEQ ID NO: 19755 - DNA, 20 bp, Artificial Sequence
  Chr20q_3 Forward Primer
ttgtctgaagtttggggtga

SEQ ID NO: 19756 - DNA, 20 bp, Artificial Sequence
  Chr20q_3 Forward Primer
gacgctggtcactttccaga

SEQ ID NO: 19757 - DNA, 19 bp, Artificial Sequence
  Chr20q_3 Forward Primer
acgtgcacaagctggagag

SEQ ID NO: 19758 - DNA, 20 bp, Artificial Sequence
  Chr20q_3 Forward Primer
ggtcaccctgtaggagcaaa

SEQ ID NO: 19759 - DNA, 20 bp, Artificial Sequence
  Chr20q_3 Forward Primer
tcagcccatgtgtgaatgat

SEQ ID NO: 19760 - DNA, 20 bp, Artificial Sequence
  Chr20q_3 Forward Primer
tagaatgacggggttcatcc

SEQ ID NO: 19761 - DNA, 20 bp, Artificial Sequence
  Chr20q_3 Forward Primer
tggtcatgaacacaatgcaa

SEQ ID NO: 19762 - DNA, 20 bp, Artificial Sequence
  Chr20q_3 Forward Primer
ggagacaccataggggaaca

SEQ ID NO: 19763 - DNA, 20 bp, Artificial Sequence
  Chr20q_3 Forward Primer
cccactaacacagtgggacc

SEQ ID NO: 19764 - DNA, 20 bp, Artificial Sequence
  Chr20q_3 Forward Primer
cccaatcctgtgtaccctca

SEQ ID NO: 19765 - DNA, 20 bp, Artificial Sequence
  Chr20q_3 Forward Primer
cttgctgaggggtcttgtgt

SEQ ID NO: 19766 - DNA, 20 bp, Artificial Sequence
  Chr20q_3 Forward Primer
gaaaacagtcatcccctgga

SEQ ID NO: 19767 - DNA, 20 bp, Artificial Sequence
  Chr20q_3 Forward Primer
aagaaaatcattgagggggc

SEQ ID NO: 19768 - DNA, 20 bp, Artificial Sequence
  Chr20q_3 Forward Primer
ggtaagcagctctgtggagg

SEQ ID NO: 19769 - DNA, 20 bp, Artificial Sequence
  Chr20q_3 Forward Primer
ataaccctacggggacaagg

SEQ ID NO: 19770 - DNA, 20 bp, Artificial Sequence
  Chr20q_3 Forward Primer
gccctacacagcagggacta

SEQ ID NO: 19771 - DNA, 20 bp, Artificial Sequence
  Chr20q_3 Forward Primer
tcagccaaggtaattgaggc

SEQ ID NO: 19772 - DNA, 20 bp, Artificial Sequence
  Chr20q_3 Forward Primer
atgctctctagggttggggt

SEQ ID NO: 19773 - DNA, 20 bp, Artificial Sequence
  Chr20q_3 Forward Primer
caggagtagctgcctgaacc

SEQ ID NO: 19774 - DNA, 20 bp, Artificial Sequence
  Chr20q_3 Forward Primer
gtcctcctgttcaatgtgcc

SEQ ID NO: 19775 - DNA, 20 bp, Artificial Sequence
  Chr20q_3 Forward Primer
gggcaagagacacagtggtt

SEQ ID NO: 19776 - DNA, 20 bp, Artificial Sequence
  Chr20q_3 Forward Primer
gtccccgctttacagatgaa

SEQ ID NO: 19777 - DNA, 20 bp, Artificial Sequence
  Chr20q_3 Forward Primer
ctcaggaaacagcagcacct

SEQ ID NO: 19778 - DNA, 20 bp, Artificial Sequence
  Chr20q_3 Forward Primer
cccttcctttgctcactctg

SEQ ID NO: 19779 - DNA, 20 bp, Artificial Sequence
  Chr20q_3 Forward Primer
gggcccaattttctctcttc

SEQ ID NO: 19780 - DNA, 20 bp, Artificial Sequence
  Chr20q_3 Forward Primer
acacccaactcccctagtcc

SEQ ID NO: 19781 - DNA, 20 bp, Artificial Sequence
  Chr20q_3 Forward Primer
cacgtgaaagtgtgagctgc

SEQ ID NO: 19782 - DNA, 20 bp, Artificial Sequence
  Chr20q_3 Forward Primer
acaggcatgtagcccagttc

SEQ ID NO: 19783 - DNA, 20 bp, Artificial Sequence
  Chr20q_3 Forward Primer
cctcaggcaaaacccataaa

SEQ ID NO: 19784 - DNA, 20 bp, Artificial Sequence
  Chr20q_3 Forward Primer
aaacagacaaaccctcagcc

SEQ ID NO: 19785 - DNA, 20 bp, Artificial Sequence
  Chr20q_3 Forward Primer
tggctacttgggcttcttgt

SEQ ID NO: 19786 - DNA, 20 bp, Artificial Sequence
  Chr20q_3 Forward Primer
agaccacacactctgtcccc

SEQ ID NO: 19787 - DNA, 20 bp, Artificial Sequence
  Chr20q_3 Forward Primer
tgcccttcaggtgcttagat

SEQ ID NO: 19788 - DNA, 20 bp, Artificial Sequence
  Chr20q_3 Forward Primer
cctatccctcagcactcacc

SEQ ID NO: 19789 - DNA, 20 bp, Artificial Sequence
  Chr20q_3 Forward Primer
gctgcccttagtggtagcag

SEQ ID NO: 19790 - DNA, 20 bp, Artificial Sequence
  Chr20q_3 Forward Primer
tcttttccaccctaccctcc

SEQ ID NO: 19791 - DNA, 20 bp, Artificial Sequence
  Chr20q_3 Forward Primer
cttgctagctgccaaggaac

SEQ ID NO: 19792 - DNA, 20 bp, Artificial Sequence
  Chr20q_3 Forward Primer
atggacagtgtctggccttt

SEQ ID NO: 19793 - DNA, 20 bp, Artificial Sequence
  Chr20q_3 Forward Primer
attcttggcattttcatggc

SEQ ID NO: 19794 - DNA, 20 bp, Artificial Sequence
  Chr20q_3 Forward Primer
aacctctgagcttggtttgg

SEQ ID NO: 19795 - DNA, 20 bp, Artificial Sequence
  Chr20q_3 Forward Primer
agagccttggtttactcccc

SEQ ID NO: 19796 - DNA, 20 bp, Artificial Sequence
  Chr20q_3 Forward Primer
tgccactgccttacactctg

SEQ ID NO: 19797 - DNA, 20 bp, Artificial Sequence
  Chr20q_3 Forward Primer
ttctgctcacacacacccac

SEQ ID NO: 19798 - DNA, 20 bp, Artificial Sequence
  Chr20q_3 Forward Primer
cagctgaggtctggagaagg

SEQ ID NO: 19799 - DNA, 20 bp, Artificial Sequence
  Chr20q_3 Forward Primer
gtaggtgtccaggcaagagc

SEQ ID NO: 19800 - DNA, 20 bp, Artificial Sequence
  Chr20q_3 Forward Primer
cttgctgacttctaaccgcc

SEQ ID NO: 19801 - DNA, 20 bp, Artificial Sequence
  Chr20q_3 Forward Primer
tctcaggattagggcaggtg

SEQ ID NO: 19802 - DNA, 19 bp, Artificial Sequence
  Chr20q_3 Forward Primer
gatcaaccacaactggccc

SEQ ID NO: 19803 - DNA, 20 bp, Artificial Sequence
  Chr20q_3 Forward Primer
catcctcactgacagagcga

SEQ ID NO: 19804 - DNA, 20 bp, Artificial Sequence
  Chr20q_3 Forward Primer
tacatacgcctggtgatcca

SEQ ID NO: 19805 - DNA, 20 bp, Artificial Sequence
  Chr20q_3 Forward Primer
cttctgtgtccctacctcgc

SEQ ID NO: 19806 - DNA, 20 bp, Artificial Sequence
  Chr20q_3 Forward Primer
gagccatgttccaaacacct

SEQ ID NO: 19807 - DNA, 20 bp, Artificial Sequence
  Chr20q_3 Forward Primer
gtcaagactcctgggttcca

SEQ ID NO: 19808 - DNA, 20 bp, Artificial Sequence
  Chr20q_3 Forward Primer
gagttctcaggccacactcc

SEQ ID NO: 19809 - DNA, 20 bp, Artificial Sequence
  Chr20q_3 Forward Primer
gctgttacactgcctccctt

SEQ ID NO: 19810 - DNA, 20 bp, Artificial Sequence
  Chr20q_3 Forward Primer
ggaagagagacacaggtggg

SEQ ID NO: 19811 - DNA, 20 bp, Artificial Sequence
  Chr20q_3 Forward Primer
tctcagtggctgggagactt

SEQ ID NO: 19812 - DNA, 20 bp, Artificial Sequence
  Chr20q_3 Forward Primer
atattggtgttttggccagc

SEQ ID NO: 19813 - DNA, 20 bp, Artificial Sequence
  Chr20q_3 Forward Primer
ctgctccatggcctagtgat

SEQ ID NO: 19814 - DNA, 20 bp, Artificial Sequence
  Chr20q_3 Forward Primer
ctgtctcccacgtgtctttg

SEQ ID NO: 19815 - DNA, 21 bp, Artificial Sequence
  Chr20q_3 Forward Primer
tctttccctagcttgcatctg

SEQ ID NO: 19816 - DNA, 20 bp, Artificial Sequence
  Chr20q_3 Forward Primer
atacagacccatgactgggc

SEQ ID NO: 19817 - DNA, 19 bp, Artificial Sequence
  Chr20q_3 Forward Primer
ctaggatctgcctcccagc

SEQ ID NO: 19818 - DNA, 20 bp, Artificial Sequence
  Chr20q_3 Forward Primer
ttgccaactgtcttgctgac

SEQ ID NO: 19819 - DNA, 19 bp, Artificial Sequence
  Chr20q_3 Forward Primer
gtccttctcctggctgtgg

SEQ ID NO: 19820 - DNA, 20 bp, Artificial Sequence
  Chr20q_3 Forward Primer
agggcggcttactaaaccat

SEQ ID NO: 19821 - DNA, 20 bp, Artificial Sequence
  Chr20q_3 Forward Primer
catgctatgtgctgtggctt

SEQ ID NO: 19822 - DNA, 20 bp, Artificial Sequence
  Chr20q_3 Forward Primer
gccctgtcttgttctgcttc

SEQ ID NO: 19823 - DNA, 20 bp, Artificial Sequence
  Chr20q_3 Forward Primer
acacctcagtgctccatcct

SEQ ID NO: 19824 - DNA, 20 bp, Artificial Sequence
  Chr20q_3 Forward Primer
ggtcagccctcaacaaagtt

SEQ ID NO: 19825 - DNA, 20 bp, Artificial Sequence
  Chr20q_3 Forward Primer
ggctccaaagccatgtttta

SEQ ID NO: 19826 - DNA, 20 bp, Artificial Sequence
  Chr20q_3 Forward Primer
gctttaggatgtgtccccaa

SEQ ID NO: 19827 - DNA, 20 bp, Artificial Sequence
  Chr20q_3 Forward Primer
gcagttcagcaacttgtcca

SEQ ID NO: 19828 - DNA, 20 bp, Artificial Sequence
  Chr20q_3 Forward Primer
ttaaaccaggatgcgaaagg

SEQ ID NO: 19829 - DNA, 20 bp, Artificial Sequence
  Chr20q_3 Reverse Primer
gggacccagagagatggaat

SEQ ID NO: 19830 - DNA, 20 bp, Artificial Sequence
  Chr20q_3 Reverse Primer
tttccacactgcctattccc

SEQ ID NO: 19831 - DNA, 20 bp, Artificial Sequence
  Chr20q_3 Reverse Primer
tcagagctccaaggttgtca

SEQ ID NO: 19832 - DNA, 20 bp, Artificial Sequence
  Chr20q_3 Reverse Primer
agatgactctgccctgtgct

SEQ ID NO: 19833 - DNA, 20 bp, Artificial Sequence
  Chr20q_3 Reverse Primer
ctctcaccttacagcccagg

SEQ ID NO: 19834 - DNA, 19 bp, Artificial Sequence
  Chr20q_3 Reverse Primer
tctcatctgagaaacgggg

SEQ ID NO: 19835 - DNA, 20 bp, Artificial Sequence
  Chr20q_3 Reverse Primer
ggctgaagtctcagagtcgg

SEQ ID NO: 19836 - DNA, 20 bp, Artificial Sequence
  Chr20q_3 Reverse Primer
aaccagtagatgtggagccg

SEQ ID NO: 19837 - DNA, 20 bp, Artificial Sequence
  Chr20q_3 Reverse Primer
cagatactttgggggagcag

SEQ ID NO: 19838 - DNA, 20 bp, Artificial Sequence
  Chr20q_3 Reverse Primer
caagcacctactggtgcaaa

SEQ ID NO: 19839 - DNA, 18 bp, Artificial Sequence
  Chr20q_3 Reverse Primer
tcccaacctgctccgtgt

SEQ ID NO: 19840 - DNA, 20 bp, Artificial Sequence
  Chr20q_3 Reverse Primer
gtagaaggagccggggaact

SEQ ID NO: 19841 - DNA, 20 bp, Artificial Sequence
  Chr20q_3 Reverse Primer
acagctccattcagcagagg

SEQ ID NO: 19842 - DNA, 20 bp, Artificial Sequence
  Chr20q_3 Reverse Primer
atgctaggcacgggtcatac

SEQ ID NO: 19843 - DNA, 20 bp, Artificial Sequence
  Chr20q_3 Reverse Primer
gcaagagcattatggggaaa

SEQ ID NO: 19844 - DNA, 20 bp, Artificial Sequence
  Chr20q_3 Reverse Primer
gaataagagctggagccacg

SEQ ID NO: 19845 - DNA, 20 bp, Artificial Sequence
  Chr20q_3 Reverse Primer
tctctcccatccaagcaaag

SEQ ID NO: 19846 - DNA, 20 bp, Artificial Sequence
  Chr20q_3 Reverse Primer
ccttttgtgccctgtgaagt

SEQ ID NO: 19847 - DNA, 20 bp, Artificial Sequence
  Chr20q_3 Reverse Primer
ttccaatgctgagaaaccct

SEQ ID NO: 19848 - DNA, 20 bp, Artificial Sequence
  Chr20q_3 Reverse Primer
cctggaaagaggagcagttg

SEQ ID NO: 19849 - DNA, 20 bp, Artificial Sequence
  Chr20q_3 Reverse Primer
tccccactttccagctacac

SEQ ID NO: 19850 - DNA, 20 bp, Artificial Sequence
  Chr20q_3 Reverse Primer
gaactcctgtaacttgcggc

SEQ ID NO: 19851 - DNA, 20 bp, Artificial Sequence
  Chr20q_3 Reverse Primer
aacatgcagaagaccttgcc

SEQ ID NO: 19852 - DNA, 20 bp, Artificial Sequence
  Chr20q_3 Reverse Primer
gtaggcgtggaagaaggtcc

SEQ ID NO: 19853 - DNA, 20 bp, Artificial Sequence
  Chr20q_3 Reverse Primer
gtcatccgtttccaatccct

SEQ ID NO: 19854 - DNA, 20 bp, Artificial Sequence
  Chr20q_3 Reverse Primer
tgacctcactaattgcagcg

SEQ ID NO: 19855 - DNA, 20 bp, Artificial Sequence
  Chr20q_3 Reverse Primer
gagaggatgcgattctccaa

SEQ ID NO: 19856 - DNA, 20 bp, Artificial Sequence
  Chr20q_3 Reverse Primer
tggcttttctaacctggctc

SEQ ID NO: 19857 - DNA, 20 bp, Artificial Sequence
  Chr20q_3 Reverse Primer
ctgtgagcatcacctctgga

SEQ ID NO: 19858 - DNA, 20 bp, Artificial Sequence
  Chr20q_3 Reverse Primer
ggcttagggggtggttatgt

SEQ ID NO: 19859 - DNA, 20 bp, Artificial Sequence
  Chr20q_3 Reverse Primer
tcagatgcagtgagacctgg

SEQ ID NO: 19860 - DNA, 20 bp, Artificial Sequence
  Chr20q_3 Reverse Primer
attgttcttcaggcgacagg

SEQ ID NO: 19861 - DNA, 20 bp, Artificial Sequence
  Chr20q_3 Reverse Primer
gtcccctcctcccaatagag

SEQ ID NO: 19862 - DNA, 20 bp, Artificial Sequence
  Chr20q_3 Reverse Primer
ccattgggtgtgggaactac

SEQ ID NO: 19863 - DNA, 20 bp, Artificial Sequence
  Chr20q_3 Reverse Primer
ttctctctccagccatcacc

SEQ ID NO: 19864 - DNA, 20 bp, Artificial Sequence
  Chr20q_3 Reverse Primer
gcctggtctccattagaggg

SEQ ID NO: 19865 - DNA, 20 bp, Artificial Sequence
  Chr20q_3 Reverse Primer
agttagtgctccaagccctg

SEQ ID NO: 19866 - DNA, 21 bp, Artificial Sequence
  Chr20q_3 Reverse Primer
gcgtgagtgtaagaactggga

SEQ ID NO: 19867 - DNA, 20 bp, Artificial Sequence
  Chr20q_3 Reverse Primer
ggaaagttgggattgggact

SEQ ID NO: 19868 - DNA, 20 bp, Artificial Sequence
  Chr20q_3 Reverse Primer
ctaggaattggggttcagca

SEQ ID NO: 19869 - DNA, 20 bp, Artificial Sequence
  Chr20q_3 Reverse Primer
ttcttgacctggtggatgtg

SEQ ID NO: 19870 - DNA, 20 bp, Artificial Sequence
  Chr20q_3 Reverse Primer
tggtacaagctcttccccac

SEQ ID NO: 19871 - DNA, 20 bp, Artificial Sequence
  Chr20q_3 Reverse Primer
caccgtcaccattaccatca

SEQ ID NO: 19872 - DNA, 19 bp, Artificial Sequence
  Chr20q_3 Reverse Primer
cgctcacgtgtgtgtgtgt

SEQ ID NO: 19873 - DNA, 20 bp, Artificial Sequence
  Chr20q_3 Reverse Primer
ctatctccagcagagggtgg

SEQ ID NO: 19874 - DNA, 20 bp, Artificial Sequence
  Chr20q_3 Reverse Primer
actggactgagctcctggaa

SEQ ID NO: 19875 - DNA, 20 bp, Artificial Sequence
  Chr20q_3 Reverse Primer
atctcttggtgcctcttcca

SEQ ID NO: 19876 - DNA, 20 bp, Artificial Sequence
  Chr20q_3 Reverse Primer
cactgggaatgtgtgctttg

SEQ ID NO: 19877 - DNA, 18 bp, Artificial Sequence
  Chr20q_3 Reverse Primer
ctgattggccaggctgag

SEQ ID NO: 19878 - DNA, 20 bp, Artificial Sequence
  Chr20q_3 Reverse Primer
cttcaggcagagcttgatcc

SEQ ID NO: 19879 - DNA, 20 bp, Artificial Sequence
  Chr20q_3 Reverse Primer
caacataggacaccctggct

SEQ ID NO: 19880 - DNA, 20 bp, Artificial Sequence
  Chr20q_3 Reverse Primer
cccttttcttagctccaccc

SEQ ID NO: 19881 - DNA, 20 bp, Artificial Sequence
  Chr20q_3 Reverse Primer
ggtgtctcctggaacgtgat

SEQ ID NO: 19882 - DNA, 22 bp, Artificial Sequence
  Chr20q_3 Reverse Primer
ttccaagtgtccagaatagtgc

SEQ ID NO: 19883 - DNA, 20 bp, Artificial Sequence
  Chr20q_3 Reverse Primer
caggcccagggtaactatca

SEQ ID NO: 19884 - DNA, 20 bp, Artificial Sequence
  Chr20q_3 Reverse Primer
cctgcagactcccagtttgt

SEQ ID NO: 19885 - DNA, 20 bp, Artificial Sequence
  Chr20q_3 Reverse Primer
gcctcactctctgggttcag

SEQ ID NO: 19886 - DNA, 20 bp, Artificial Sequence
  Chr20q_3 Reverse Primer
tcccaccaggaactgagaag

SEQ ID NO: 19887 - DNA, 20 bp, Artificial Sequence
  Chr20q_3 Reverse Primer
cagcaagcagttggctagtg

SEQ ID NO: 19888 - DNA, 20 bp, Artificial Sequence
  Chr20q_3 Reverse Primer
ctgctgtagggtttggcagt

SEQ ID NO: 19889 - DNA, 20 bp, Artificial Sequence
  Chr20q_3 Reverse Primer
gcagggaatctcatttcacc

SEQ ID NO: 19890 - DNA, 20 bp, Artificial Sequence
  Chr20q_3 Reverse Primer
acagggaacccgtaaactcc

SEQ ID NO: 19891 - DNA, 20 bp, Artificial Sequence
  Chr20q_3 Reverse Primer
aaggacaaagcagagctgga

SEQ ID NO: 19892 - DNA, 20 bp, Artificial Sequence
  Chr20q_3 Reverse Primer
tacatttcactccttcccgc

SEQ ID NO: 19893 - DNA, 20 bp, Artificial Sequence
  Chr20q_3 Reverse Primer
gaagtggaatggaacgggta

SEQ ID NO: 19894 - DNA, 20 bp, Artificial Sequence
  Chr20q_3 Reverse Primer
gtttgccacccagcacttat

SEQ ID NO: 19895 - DNA, 20 bp, Artificial Sequence
  Chr20q_3 Reverse Primer
gtgcacagggctaccatctc

SEQ ID NO: 19896 - DNA, 20 bp, Artificial Sequence
  Chr20q_3 Reverse Primer
gaaacatgcacctgggagtt

SEQ ID NO: 19897 - DNA, 20 bp, Artificial Sequence
  Chr20q_3 Reverse Primer
ggctttctttccttgagcct

SEQ ID NO: 19898 - DNA, 19 bp, Artificial Sequence
  Chr20q_3 Reverse Primer
agtggctgagctgggattc

SEQ ID NO: 19899 - DNA, 20 bp, Artificial Sequence
  Chr20q_3 Reverse Primer
tagaatgtgccaggcagttg

SEQ ID NO: 19900 - DNA, 20 bp, Artificial Sequence
  Chr20q_3 Reverse Primer
ctgtaggcattttgggcact

SEQ ID NO: 19901 - DNA, 20 bp, Artificial Sequence
  Chr20q_3 Reverse Primer
tgttggctgtgaggattacg

SEQ ID NO: 19902 - DNA, 20 bp, Artificial Sequence
  Chr20q_3 Reverse Primer
atatctgtcagcctcacggg

SEQ ID NO: 19903 - DNA, 20 bp, Artificial Sequence
  Chr20q_3 Reverse Primer
accctcattctcccacacac

SEQ ID NO: 19904 - DNA, 20 bp, Artificial Sequence
  Chr20q_3 Reverse Primer
cccgttggttttgaaaaatg

SEQ ID NO: 19905 - DNA, 20 bp, Artificial Sequence
  Chr20q_3 Reverse Primer
tccattgaggacagcatgaa

SEQ ID NO: 19906 - DNA, 20 bp, Artificial Sequence
  Chr20q_3 Reverse Primer
aagggggagaaaaagcacat

SEQ ID NO: 19907 - DNA, 20 bp, Artificial Sequence
  Chr20q_3 Reverse Primer
agaaggctgctgttttggag

SEQ ID NO: 19908 - DNA, 20 bp, Artificial Sequence
  Chr20q_3 Reverse Primer
gcctcctgttttgggtactg

SEQ ID NO: 19909 - DNA, 20 bp, Artificial Sequence
  Chr20q_3 Reverse Primer
ctctcttgtcctctggcagg

SEQ ID NO: 19910 - DNA, 20 bp, Artificial Sequence
  Chr20q_3 Reverse Primer
gaaacacgcagggaagatgt

SEQ ID NO: 19911 - DNA, 20 bp, Artificial Sequence
  Chr20q_3 Reverse Primer
gtttgttcctgcacgtctga

SEQ ID NO: 19912 - DNA, 20 bp, Artificial Sequence
  Chr20q_3 Reverse Primer
gctgtaggatgccacacaga

SEQ ID NO: 19913 - DNA, 20 bp, Artificial Sequence
  Chr20q_3 Reverse Primer
ttctccctctgcagtggttt

SEQ ID NO: 19914 - DNA, 20 bp, Artificial Sequence
  Chr20q_3 Reverse Primer
ggatcttggtgggggtagtt

SEQ ID NO: 19915 - DNA, 20 bp, Artificial Sequence
  Chr20q_3 Reverse Primer
ggagccacactgagagatca

SEQ ID NO: 19916 - DNA, 20 bp, Artificial Sequence
  Chr20q_3 Reverse Primer
tgttcatttctccctggctc

SEQ ID NO: 19917 - DNA, 20 bp, Artificial Sequence
  Chr20q_3 Reverse Primer
agggttcatcctcccatttc

SEQ ID NO: 19918 - DNA, 20 bp, Artificial Sequence
  Chr20q_3 Reverse Primer
atttccttcccaatgtgctg

SEQ ID NO: 19919 - DNA, 20 bp, Artificial Sequence
  Chr20q_3 Reverse Primer
ccctgagattctggtgcttt

SEQ ID NO: 19920 - DNA, 20 bp, Artificial Sequence
  Chr20q_3 Reverse Primer
gtttgaagtccagctccacc

SEQ ID NO: 19921 - DNA, 20 bp, Artificial Sequence
  Chr20q_3 Reverse Primer
cgaatgagctcacgctgtaa

SEQ ID NO: 19922 - DNA, 24 bp, Artificial Sequence
  Chr20q_3 Reverse Primer
ttgtacatggtacagggtaaatgc

SEQ ID NO: 19923 - DNA, 20 bp, Artificial Sequence
  Chr20q_3 Reverse Primer
gcttgaggcttttcatctgg

SEQ ID NO: 19924 - DNA, 20 bp, Artificial Sequence
  Chr20q_3 Reverse Primer
gcccttgattttcagatgga

SEQ ID NO: 19925 - DNA, 20 bp, Artificial Sequence
  Chr20q_4 Forward Primer
tctgtatgggctctgtgtgg

SEQ ID NO: 19926 - DNA, 20 bp, Artificial Sequence
  Chr20q_4 Forward Primer
ttcttcatctgtgcaatggg

SEQ ID NO: 19927 - DNA, 20 bp, Artificial Sequence
  Chr20q_4 Forward Primer
ttcattcatgtggggatgtg

SEQ ID NO: 19928 - DNA, 20 bp, Artificial Sequence
  Chr20q_4 Forward Primer
aagcgtggctgaagtaggtt

SEQ ID NO: 19929 - DNA, 20 bp, Artificial Sequence
  Chr20q_4 Forward Primer
atgaaaacattcagggcagc

SEQ ID NO: 19930 - DNA, 20 bp, Artificial Sequence
  Chr20q_4 Forward Primer
gctgccagggatgattacat

SEQ ID NO: 19931 - DNA, 20 bp, Artificial Sequence
  Chr20q_4 Forward Primer
gcaatggactgggaacaagt

SEQ ID NO: 19932 - DNA, 20 bp, Artificial Sequence
  Chr20q_4 Forward Primer
gccctgtcacagcagtcttt

SEQ ID NO: 19933 - DNA, 20 bp, Artificial Sequence
  Chr20q_4 Forward Primer
ccctcctatgcaaggcacta

SEQ ID NO: 19934 - DNA, 20 bp, Artificial Sequence
  Chr20q_4 Forward Primer
tggggaataacagtcaagcc

SEQ ID NO: 19935 - DNA, 20 bp, Artificial Sequence
  Chr20q_4 Forward Primer
ggctgggtcagagatggata

SEQ ID NO: 19936 - DNA, 20 bp, Artificial Sequence
  Chr20q_4 Forward Primer
gaccctgtttctccgtttca

SEQ ID NO: 19937 - DNA, 20 bp, Artificial Sequence
  Chr20q_4 Forward Primer
gtcaactctggctctctggg

SEQ ID NO: 19938 - DNA, 20 bp, Artificial Sequence
  Chr20q_4 Forward Primer
gagtggtggagagaaggacg

SEQ ID NO: 19939 - DNA, 20 bp, Artificial Sequence
  Chr20q_4 Forward Primer
tgcaacacagggtttccata

SEQ ID NO: 19940 - DNA, 19 bp, Artificial Sequence
  Chr20q_4 Forward Primer
catgtgaaccgaggacacc

SEQ ID NO: 19941 - DNA, 20 bp, Artificial Sequence
  Chr20q_4 Forward Primer
ccctgtgcgtgttgtttatg

SEQ ID NO: 19942 - DNA, 20 bp, Artificial Sequence
  Chr20q_4 Forward Primer
ccgtatatggctgcagagaa

SEQ ID NO: 19943 - DNA, 20 bp, Artificial Sequence
  Chr20q_4 Forward Primer
ggatctgaggaatgcaaagg

SEQ ID NO: 19944 - DNA, 20 bp, Artificial Sequence
  Chr20q_4 Forward Primer
aggctgtggtaggtgtccag

SEQ ID NO: 19945 - DNA, 20 bp, Artificial Sequence
  Chr20q_4 Forward Primer
aacatcagctgaggggtctg

SEQ ID NO: 19946 - DNA, 21 bp, Artificial Sequence
  Chr20q_4 Forward Primer
taaaagctccatgaaagcagg

SEQ ID NO: 19947 - DNA, 20 bp, Artificial Sequence
  Chr20q_4 Forward Primer
cactctgtcaggtccctggt

SEQ ID NO: 19948 - DNA, 20 bp, Artificial Sequence
  Chr20q_4 Forward Primer
caagaagaacgctcctgtcc

SEQ ID NO: 19949 - DNA, 23 bp, Artificial Sequence
  Chr20q_4 Forward Primer
cacagaaatactatcggggaaga

SEQ ID NO: 19950 - DNA, 20 bp, Artificial Sequence
  Chr20q_4 Forward Primer
tatgaccatcactgccatcg

SEQ ID NO: 19951 - DNA, 20 bp, Artificial Sequence
  Chr20q_4 Forward Primer
taaacctcaccacactcccc

SEQ ID NO: 19952 - DNA, 20 bp, Artificial Sequence
  Chr20q_4 Forward Primer
aacattccaagagcctccct

SEQ ID NO: 19953 - DNA, 20 bp, Artificial Sequence
  Chr20q_4 Forward Primer
atagatgtggcccagagtgg

SEQ ID NO: 19954 - DNA, 20 bp, Artificial Sequence
  Chr20q_4 Forward Primer
atttttgtgcccaaggtgag

SEQ ID NO: 19955 - DNA, 20 bp, Artificial Sequence
  Chr20q_4 Forward Primer
tggcttgatcacacacatcc

SEQ ID NO: 19956 - DNA, 20 bp, Artificial Sequence
  Chr20q_4 Forward Primer
acctaccttgctggtgatgg

SEQ ID NO: 19957 - DNA, 20 bp, Artificial Sequence
  Chr20q_4 Forward Primer
gggttccagaccacacaaat

SEQ ID NO: 19958 - DNA, 20 bp, Artificial Sequence
  Chr20q_4 Forward Primer
gagccactgttagctggagg

SEQ ID NO: 19959 - DNA, 20 bp, Artificial Sequence
  Chr20q_4 Forward Primer
attttccagaaatggcaacg

SEQ ID NO: 19960 - DNA, 20 bp, Artificial Sequence
  Chr20q_4 Forward Primer
aactgtgaccctggaaggtg

SEQ ID NO: 19961 - DNA, 20 bp, Artificial Sequence
  Chr20q_4 Forward Primer
gatcgtgcttgctgcattta

SEQ ID NO: 19962 - DNA, 20 bp, Artificial Sequence
  Chr20q_4 Forward Primer
ggtgactgatctccagcctt

SEQ ID NO: 19963 - DNA, 20 bp, Artificial Sequence
  Chr20q_4 Forward Primer
tgggtctgggttttctatgc

SEQ ID NO: 19964 - DNA, 20 bp, Artificial Sequence
  Chr20q_4 Forward Primer
gacaaattccttcaccgctc

SEQ ID NO: 19965 - DNA, 18 bp, Artificial Sequence
  Chr20q_4 Forward Primer
agggtggacgaaggcaag

SEQ ID NO: 19966 - DNA, 20 bp, Artificial Sequence
  Chr20q_4 Forward Primer
gtgcaaaggccctgagatag

SEQ ID NO: 19967 - DNA, 20 bp, Artificial Sequence
  Chr20q_4 Forward Primer
aacctgaccgtcactcaacc

SEQ ID NO: 19968 - DNA, 20 bp, Artificial Sequence
  Chr20q_4 Forward Primer
ccactggggtagtttgctgt

SEQ ID NO: 19969 - DNA, 20 bp, Artificial Sequence
  Chr20q_4 Forward Primer
caggccacagatacaccaca

SEQ ID NO: 19970 - DNA, 20 bp, Artificial Sequence
  Chr20q_4 Forward Primer
ggtgagcctgcctgagtaat

SEQ ID NO: 19971 - DNA, 20 bp, Artificial Sequence
  Chr20q_4 Forward Primer
attccactctgccactttgc

SEQ ID NO: 19972 - DNA, 20 bp, Artificial Sequence
  Chr20q_4 Forward Primer
cggtaagagcaaaggcaaag

SEQ ID NO: 19973 - DNA, 20 bp, Artificial Sequence
  Chr20q_4 Forward Primer
tcttgatcccccactacctg

SEQ ID NO: 19974 - DNA, 20 bp, Artificial Sequence
  Chr20q_4 Forward Primer
gtgctgtccctatgtcctcc

SEQ ID NO: 19975 - DNA, 20 bp, Artificial Sequence
  Chr20q_4 Forward Primer
gcgttcagctcatccgttat

SEQ ID NO: 19976 - DNA, 20 bp, Artificial Sequence
  Chr20q_4 Forward Primer
gggagcattttcgagacatc

SEQ ID NO: 19977 - DNA, 20 bp, Artificial Sequence
  Chr20q_4 Forward Primer
gtttctggaaagcccacaag

SEQ ID NO: 19978 - DNA, 20 bp, Artificial Sequence
  Chr20q_4 Forward Primer
gggagttcaggccatattca

SEQ ID NO: 19979 - DNA, 20 bp, Artificial Sequence
  Chr20q_4 Forward Primer
tttcaagccttctggactgg

SEQ ID NO: 19980 - DNA, 20 bp, Artificial Sequence
  Chr20q_4 Forward Primer
ctcgatcctctggcaacttc

SEQ ID NO: 19981 - DNA, 20 bp, Artificial Sequence
  Chr20q_4 Forward Primer
agtcctactaacggcacccc

SEQ ID NO: 19982 - DNA, 20 bp, Artificial Sequence
  Chr20q_4 Forward Primer
aagacagggatcagcaccag

SEQ ID NO: 19983 - DNA, 20 bp, Artificial Sequence
  Chr20q_4 Forward Primer
agtgggtctggccatgtaag

SEQ ID NO: 19984 - DNA, 20 bp, Artificial Sequence
  Chr20q_4 Forward Primer
agtcttcccagcaaccaaaa

SEQ ID NO: 19985 - DNA, 20 bp, Artificial Sequence
  Chr20q_4 Forward Primer
caccgcgagaacagaatgta

SEQ ID NO: 19986 - DNA, 22 bp, Artificial Sequence
  Chr20q_4 Forward Primer
cagggacagaatgataacaacg

SEQ ID NO: 19987 - DNA, 20 bp, Artificial Sequence
  Chr20q_4 Forward Primer
cccgagaacagggacagtaa

SEQ ID NO: 19988 - DNA, 20 bp, Artificial Sequence
  Chr20q_4 Forward Primer
tctgaacaattccagagccc

SEQ ID NO: 19989 - DNA, 20 bp, Artificial Sequence
  Chr20q_4 Forward Primer
tccagagctccctctgattc

SEQ ID NO: 19990 - DNA, 20 bp, Artificial Sequence
  Chr20q_4 Forward Primer
ccaggccacatcctcttcta

SEQ ID NO: 19991 - DNA, 20 bp, Artificial Sequence
  Chr20q_4 Forward Primer
tatttcaaatggcacccaca

SEQ ID NO: 19992 - DNA, 20 bp, Artificial Sequence
  Chr20q_4 Forward Primer
aggcaaacccagcattacac

SEQ ID NO: 19993 - DNA, 20 bp, Artificial Sequence
  Chr20q_4 Forward Primer
gcccaatgtctctcaccact

SEQ ID NO: 19994 - DNA, 20 bp, Artificial Sequence
  Chr20q_4 Forward Primer
gtgcatgatgtcctgctgac

SEQ ID NO: 19995 - DNA, 20 bp, Artificial Sequence
  Chr20q_4 Forward Primer
cctgcagagcattttcttcc

SEQ ID NO: 19996 - DNA, 20 bp, Artificial Sequence
  Chr20q_4 Forward Primer
acagagaggcctggggttat

SEQ ID NO: 19997 - DNA, 22 bp, Artificial Sequence
  Chr20q_4 Forward Primer
cacagaatgtggaattacctgg

SEQ ID NO: 19998 - DNA, 20 bp, Artificial Sequence
  Chr20q_4 Forward Primer
agaccgattgggaaaggaag

SEQ ID NO: 19999 - DNA, 20 bp, Artificial Sequence
  Chr20q_4 Forward Primer
agcatctctggaaatccgtg

SEQ ID NO: 20000 - DNA, 20 bp, Artificial Sequence
  Chr20q_4 Forward Primer
actctatggaagcctggggt

SEQ ID NO: 20001 - DNA, 20 bp, Artificial Sequence
  Chr20q_4 Forward Primer
cagaacctagggcgaatcag

SEQ ID NO: 20002 - DNA, 20 bp, Artificial Sequence
  Chr20q_4 Forward Primer
gctgtgcattctgcatctgt

SEQ ID NO: 20003 - DNA, 21 bp, Artificial Sequence
  Chr20q_4 Forward Primer
tgcgaactgaacaaaacaatg

SEQ ID NO: 20004 - DNA, 20 bp, Artificial Sequence
  Chr20q_4 Forward Primer
cccggtgaaatttgcttaaa

SEQ ID NO: 20005 - DNA, 20 bp, Artificial Sequence
  Chr20q_4 Forward Primer
tgctatgacttggggagctg

SEQ ID NO: 20006 - DNA, 20 bp, Artificial Sequence
  Chr20q_4 Forward Primer
aggcatggtaggtgaaggtg

SEQ ID NO: 20007 - DNA, 20 bp, Artificial Sequence
  Chr20q_4 Forward Primer
gaatcactcagccacccttc

SEQ ID NO: 20008 - DNA, 20 bp, Artificial Sequence
  Chr20q_4 Forward Primer
aaggtagctcattcccgtcc

SEQ ID NO: 20009 - DNA, 20 bp, Artificial Sequence
  Chr20q_4 Forward Primer
tggcaaataataggcccttg

SEQ ID NO: 20010 - DNA, 20 bp, Artificial Sequence
  Chr20q_4 Forward Primer
cttggatgtcccaggaagaa

SEQ ID NO: 20011 - DNA, 20 bp, Artificial Sequence
  Chr20q_4 Forward Primer
ccaggtgaagaaatggaagc

SEQ ID NO: 20012 - DNA, 20 bp, Artificial Sequence
  Chr20q_4 Forward Primer
catcaccacctgcctctgat

SEQ ID NO: 20013 - DNA, 20 bp, Artificial Sequence
  Chr20q_4 Forward Primer
tgcctaatttccattgggag

SEQ ID NO: 20014 - DNA, 20 bp, Artificial Sequence
  Chr20q_4 Forward Primer
cctcagaggactggcttcat

SEQ ID NO: 20015 - DNA, 20 bp, Artificial Sequence
  Chr20q_4 Forward Primer
ggcacacagtagaaaggcgt

SEQ ID NO: 20016 - DNA, 20 bp, Artificial Sequence
  Chr20q_4 Forward Primer
gagaaaccctctctggaggc

SEQ ID NO: 20017 - DNA, 20 bp, Artificial Sequence
  Chr20q_4 Forward Primer
gctggtggatcctgaacaat

SEQ ID NO: 20018 - DNA, 20 bp, Artificial Sequence
  Chr20q_4 Forward Primer
catggacacgttttgtttgg

SEQ ID NO: 20019 - DNA, 20 bp, Artificial Sequence
  Chr20q_4 Forward Primer
tgagtagtgaggccatgcag

SEQ ID NO: 20020 - DNA, 20 bp, Artificial Sequence
  Chr20q_4 Forward Primer
atgcctctcttctctccacg

SEQ ID NO: 20021 - DNA, 22 bp, Artificial Sequence
  Chr20q_4 Reverse Primer
gccattcatctttgtctgagag

SEQ ID NO: 20022 - DNA, 20 bp, Artificial Sequence
  Chr20q_4 Reverse Primer
cattgtaacagctcccacca

SEQ ID NO: 20023 - DNA, 20 bp, Artificial Sequence
  Chr20q_4 Reverse Primer
cattctctttcccctgacca

SEQ ID NO: 20024 - DNA, 21 bp, Artificial Sequence
  Chr20q_4 Reverse Primer
caggagaaccacaagaatgga

SEQ ID NO: 20025 - DNA, 20 bp, Artificial Sequence
  Chr20q_4 Reverse Primer
agaaatctcacccctgagca

SEQ ID NO: 20026 - DNA, 20 bp, Artificial Sequence
  Chr20q_4 Reverse Primer
caaagtgagacccagggaga

SEQ ID NO: 20027 - DNA, 20 bp, Artificial Sequence
  Chr20q_4 Reverse Primer
aggaaaaggtctctccaggc

SEQ ID NO: 20028 - DNA, 20 bp, Artificial Sequence
  Chr20q_4 Reverse Primer
tgtggaagagcagacaggtg

SEQ ID NO: 20029 - DNA, 20 bp, Artificial Sequence
  Chr20q_4 Reverse Primer
tttcacaattgcaaagcagg

SEQ ID NO: 20030 - DNA, 20 bp, Artificial Sequence
  Chr20q_4 Reverse Primer
tatttaggggctccaagcct

SEQ ID NO: 20031 - DNA, 20 bp, Artificial Sequence
  Chr20q_4 Reverse Primer
taatgcgtgattgtggagga

SEQ ID NO: 20032 - DNA, 20 bp, Artificial Sequence
  Chr20q_4 Reverse Primer
ccagccacttctggttgata

SEQ ID NO: 20033 - DNA, 20 bp, Artificial Sequence
  Chr20q_4 Reverse Primer
tttgcaagggtcagaaatcc

SEQ ID NO: 20034 - DNA, 20 bp, Artificial Sequence
  Chr20q_4 Reverse Primer
tgggatcctcaggaattttg

SEQ ID NO: 20035 - DNA, 20 bp, Artificial Sequence
  Chr20q_4 Reverse Primer
attggaacccaactttgtcc

SEQ ID NO: 20036 - DNA, 20 bp, Artificial Sequence
  Chr20q_4 Reverse Primer
aggactggacttaacaccgc

SEQ ID NO: 20037 - DNA, 20 bp, Artificial Sequence
  Chr20q_4 Reverse Primer
attccatccgcatattcctg

SEQ ID NO: 20038 - DNA, 20 bp, Artificial Sequence
  Chr20q_4 Reverse Primer
aaagccgttgggctaaagta

SEQ ID NO: 20039 - DNA, 20 bp, Artificial Sequence
  Chr20q_4 Reverse Primer
aaaggcctgcctctcttctc

SEQ ID NO: 20040 - DNA, 20 bp, Artificial Sequence
  Chr20q_4 Reverse Primer
cgattcctctccatctcagg

SEQ ID NO: 20041 - DNA, 20 bp, Artificial Sequence
  Chr20q_4 Reverse Primer
ataggcccaggaaggatgtt

SEQ ID NO: 20042 - DNA, 23 bp, Artificial Sequence
  Chr20q_4 Reverse Primer
tctactgtataccaggccctgaa

SEQ ID NO: 20043 - DNA, 20 bp, Artificial Sequence
  Chr20q_4 Reverse Primer
cctagccaaggtcaggctaa

SEQ ID NO: 20044 - DNA, 20 bp, Artificial Sequence
  Chr20q_4 Reverse Primer
atccatcagggaggacactg

SEQ ID NO: 20045 - DNA, 20 bp, Artificial Sequence
  Chr20q_4 Reverse Primer
cccattttcttgcaccttga

SEQ ID NO: 20046 - DNA, 22 bp, Artificial Sequence
  Chr20q_4 Reverse Primer
tgctttgtaaactcaggagagg

SEQ ID NO: 20047 - DNA, 20 bp, Artificial Sequence
  Chr20q_4 Reverse Primer
cccagcatctagcagagtcc

SEQ ID NO: 20048 - DNA, 20 bp, Artificial Sequence
  Chr20q_4 Reverse Primer
agtcaggactctccttgcca

SEQ ID NO: 20049 - DNA, 21 bp, Artificial Sequence
  Chr20q_4 Reverse Primer
cagtgaccagaggggttgtaa

SEQ ID NO: 20050 - DNA, 20 bp, Artificial Sequence
  Chr20q_4 Reverse Primer
ttaaaggcctgtccgtcttc

SEQ ID NO: 20051 - DNA, 20 bp, Artificial Sequence
  Chr20q_4 Reverse Primer
aaagcagaggctcagagagg

SEQ ID NO: 20052 - DNA, 20 bp, Artificial Sequence
  Chr20q_4 Reverse Primer
ccttcctgcctcaaacagag

SEQ ID NO: 20053 - DNA, 20 bp, Artificial Sequence
  Chr20q_4 Reverse Primer
gagtggcttgtctttgcctc

SEQ ID NO: 20054 - DNA, 20 bp, Artificial Sequence
  Chr20q_4 Reverse Primer
ctccaacattgagcaggaca

SEQ ID NO: 20055 - DNA, 21 bp, Artificial Sequence
  Chr20q_4 Reverse Primer
ccatgaggttgtcagatgctt

SEQ ID NO: 20056 - DNA, 20 bp, Artificial Sequence
  Chr20q_4 Reverse Primer
tgcaaaattgaaggaggagc

SEQ ID NO: 20057 - DNA, 20 bp, Artificial Sequence
  Chr20q_4 Reverse Primer
tacttgctttcgcagaccct

SEQ ID NO: 20058 - DNA, 20 bp, Artificial Sequence
  Chr20q_4 Reverse Primer
tgcaattgtggaaaacagga

SEQ ID NO: 20059 - DNA, 20 bp, Artificial Sequence
  Chr20q_4 Reverse Primer
cctcagttcccaccattcat

SEQ ID NO: 20060 - DNA, 20 bp, Artificial Sequence
  Chr20q_4 Reverse Primer
agcccactgtcatcttctgg

SEQ ID NO: 20061 - DNA, 18 bp, Artificial Sequence
  Chr20q_4 Reverse Primer
ggacatgcaacgtggagt

SEQ ID NO: 20062 - DNA, 20 bp, Artificial Sequence
  Chr20q_4 Reverse Primer
ccagagcctcctcttcctct

SEQ ID NO: 20063 - DNA, 20 bp, Artificial Sequence
  Chr20q_4 Reverse Primer
cataggctctagctgccagg

SEQ ID NO: 20064 - DNA, 20 bp, Artificial Sequence
  Chr20q_4 Reverse Primer
gcttctccccctcacacata

SEQ ID NO: 20065 - DNA, 19 bp, Artificial Sequence
  Chr20q_4 Reverse Primer
aggaaaggggactgcaaag

SEQ ID NO: 20066 - DNA, 20 bp, Artificial Sequence
  Chr20q_4 Reverse Primer
tcatcatgaatgcagcagtg

SEQ ID NO: 20067 - DNA, 20 bp, Artificial Sequence
  Chr20q_4 Reverse Primer
aagaaacttccccagttccc

SEQ ID NO: 20068 - DNA, 20 bp, Artificial Sequence
  Chr20q_4 Reverse Primer
cgtggctatttgggtcactt

SEQ ID NO: 20069 - DNA, 20 bp, Artificial Sequence
  Chr20q_4 Reverse Primer
tggtaggatacatcaggggc

SEQ ID NO: 20070 - DNA, 20 bp, Artificial Sequence
  Chr20q_4 Reverse Primer
tagctcagctggtggatgtg

SEQ ID NO: 20071 - DNA, 20 bp, Artificial Sequence
  Chr20q_4 Reverse Primer
cagctagtgttgcacaggga

SEQ ID NO: 20072 - DNA, 20 bp, Artificial Sequence
  Chr20q_4 Reverse Primer
attccatgaggcaaggactg

SEQ ID NO: 20073 - DNA, 20 bp, Artificial Sequence
  Chr20q_4 Reverse Primer
atgcaggaaagaggctggta

SEQ ID NO: 20074 - DNA, 20 bp, Artificial Sequence
  Chr20q_4 Reverse Primer
gctcaaactgtggttgctga

SEQ ID NO: 20075 - DNA, 21 bp, Artificial Sequence
  Chr20q_4 Reverse Primer
tgcttttcaaactgatggtca

SEQ ID NO: 20076 - DNA, 20 bp, Artificial Sequence
  Chr20q_4 Reverse Primer
actttctccctctgctcgtg

SEQ ID NO: 20077 - DNA, 20 bp, Artificial Sequence
  Chr20q_4 Reverse Primer
catgagcacaggaagcatgt

SEQ ID NO: 20078 - DNA, 20 bp, Artificial Sequence
  Chr20q_4 Reverse Primer
ctcaagtggaacccaggaga

SEQ ID NO: 20079 - DNA, 20 bp, Artificial Sequence
  Chr20q_4 Reverse Primer
caccccaatagcttccttca

SEQ ID NO: 20080 - DNA, 20 bp, Artificial Sequence
  Chr20q_4 Reverse Primer
gagaacagcaagaaggccac

SEQ ID NO: 20081 - DNA, 20 bp, Artificial Sequence
  Chr20q_4 Reverse Primer
caaaagggcacacagtgaaa

SEQ ID NO: 20082 - DNA, 20 bp, Artificial Sequence
  Chr20q_4 Reverse Primer
ttgagcaaatcgtgacaacc

SEQ ID NO: 20083 - DNA, 20 bp, Artificial Sequence
  Chr20q_4 Reverse Primer
cacagacattcccctccagt

SEQ ID NO: 20084 - DNA, 20 bp, Artificial Sequence
  Chr20q_4 Reverse Primer
gatacaggctggacacaggg

SEQ ID NO: 20085 - DNA, 20 bp, Artificial Sequence
  Chr20q_4 Reverse Primer
agactccctgtagctggtgg

SEQ ID NO: 20086 - DNA, 20 bp, Artificial Sequence
  Chr20q_4 Reverse Primer
ggactttggctgttgtcctc

SEQ ID NO: 20087 - DNA, 20 bp, Artificial Sequence
  Chr20q_4 Reverse Primer
tctactgtatgccagcccct

SEQ ID NO: 20088 - DNA, 20 bp, Artificial Sequence
  Chr20q_4 Reverse Primer
tttctggcaggaaagtttgg

SEQ ID NO: 20089 - DNA, 20 bp, Artificial Sequence
  Chr20q_4 Reverse Primer
gactggccacctttgttgtt

SEQ ID NO: 20090 - DNA, 20 bp, Artificial Sequence
  Chr20q_4 Reverse Primer
cattggccaaagttggtttc

SEQ ID NO: 20091 - DNA, 20 bp, Artificial Sequence
  Chr20q_4 Reverse Primer
gaaactggcactgggtcatt

SEQ ID NO: 20092 - DNA, 20 bp, Artificial Sequence
  Chr20q_4 Reverse Primer
ttctccacttttgccacctc

SEQ ID NO: 20093 - DNA, 19 bp, Artificial Sequence
  Chr20q_4 Reverse Primer
actgcacccagcttcacaa

SEQ ID NO: 20094 - DNA, 20 bp, Artificial Sequence
  Chr20q_4 Reverse Primer
ggagagcatgactcaccgtt

SEQ ID NO: 20095 - DNA, 20 bp, Artificial Sequence
  Chr20q_4 Reverse Primer
caccaagtcctcacatccct

SEQ ID NO: 20096 - DNA, 20 bp, Artificial Sequence
  Chr20q_4 Reverse Primer
tggttaccttcccaagttgc

SEQ ID NO: 20097 - DNA, 20 bp, Artificial Sequence
  Chr20q_4 Reverse Primer
aagagagggggagtgaaagg

SEQ ID NO: 20098 - DNA, 20 bp, Artificial Sequence
  Chr20q_4 Reverse Primer
tcggcctgactcttaaccac

SEQ ID NO: 20099 - DNA, 20 bp, Artificial Sequence
  Chr20q_4 Reverse Primer
cgaggtctttcctgctttga

SEQ ID NO: 20100 - DNA, 20 bp, Artificial Sequence
  Chr20q_4 Reverse Primer
ccatctctgagccaaccact

SEQ ID NO: 20101 - DNA, 25 bp, Artificial Sequence
  Chr20q_4 Reverse Primer
tgattctaactgatcgtagcaaaaa

SEQ ID NO: 20102 - DNA, 20 bp, Artificial Sequence
  Chr20q_4 Reverse Primer
caactctggcaggtcctttc

SEQ ID NO: 20103 - DNA, 20 bp, Artificial Sequence
  Chr20q_4 Reverse Primer
ctggcctaattggcatgatt

SEQ ID NO: 20104 - DNA, 20 bp, Artificial Sequence
  Chr20q_4 Reverse Primer
atccacccatttgccataga

SEQ ID NO: 20105 - DNA, 20 bp, Artificial Sequence
  Chr20q_4 Reverse Primer
tgtgtgatctcggataggca

SEQ ID NO: 20106 - DNA, 20 bp, Artificial Sequence
  Chr20q_4 Reverse Primer
gttgcatggcttcagtgaga

SEQ ID NO: 20107 - DNA, 20 bp, Artificial Sequence
  Chr20q_4 Reverse Primer
ccaccaggacaatgaaggag

SEQ ID NO: 20108 - DNA, 20 bp, Artificial Sequence
  Chr20q_4 Reverse Primer
acatcatctgccttgaaccc

SEQ ID NO: 20109 - DNA, 20 bp, Artificial Sequence
  Chr20q_4 Reverse Primer
tccctcagtgatggggtaac

SEQ ID NO: 20110 - DNA, 20 bp, Artificial Sequence
  Chr20q_4 Reverse Primer
tgtttctaaacgtcccctgg

SEQ ID NO: 20111 - DNA, 20 bp, Artificial Sequence
  Chr20q_4 Reverse Primer
agtgaatgggtcaggtgagg

SEQ ID NO: 20112 - DNA, 20 bp, Artificial Sequence
  Chr20q_4 Reverse Primer
cccctttctgagtgaccttg

SEQ ID NO: 20113 - DNA, 20 bp, Artificial Sequence
  Chr20q_4 Reverse Primer
tttggtagccattttgccat

SEQ ID NO: 20114 - DNA, 20 bp, Artificial Sequence
  Chr20q_4 Reverse Primer
atcctgacaaaaggagcagc

SEQ ID NO: 20115 - DNA, 20 bp, Artificial Sequence
  Chr20q_4 Reverse Primer
ccccttctcgctcttaggtt

SEQ ID NO: 20116 - DNA, 20 bp, Artificial Sequence
  Chr20q_4 Reverse Primer
cctgccttatttctggctga

SEQ ID NO: 20117 - DNA, 20 bp, Artificial Sequence
  Chr20q_5 Forward Primer
gccatggctgttctcttagc

SEQ ID NO: 20118 - DNA, 20 bp, Artificial Sequence
  Chr20q_5 Forward Primer
cagcaggcaatgactccata

SEQ ID NO: 20119 - DNA, 20 bp, Artificial Sequence
  Chr20q_5 Forward Primer
gccagtcttgcttgagaagg

SEQ ID NO: 20120 - DNA, 20 bp, Artificial Sequence
  Chr20q_5 Forward Primer
taggcaaaaaccgaatggac

SEQ ID NO: 20121 - DNA, 23 bp, Artificial Sequence
  Chr20q_5 Forward Primer
ttctttgcagagacaaatcagaa

SEQ ID NO: 20122 - DNA, 20 bp, Artificial Sequence
  Chr20q_5 Forward Primer
tatctcagggcattcagcct

SEQ ID NO: 20123 - DNA, 24 bp, Artificial Sequence
  Chr20q_5 Forward Primer
tgatggcaatataattcaaacaca

SEQ ID NO: 20124 - DNA, 20 bp, Artificial Sequence
  Chr20q_5 Forward Primer
attccccagccaaggtaaat

SEQ ID NO: 20125 - DNA, 20 bp, Artificial Sequence
  Chr20q_5 Forward Primer
taccagctgcagaagcacag

SEQ ID NO: 20126 - DNA, 20 bp, Artificial Sequence
  Chr20q_5 Forward Primer
tgccgataactgaaaagtgc

SEQ ID NO: 20127 - DNA, 20 bp, Artificial Sequence
  Chr20q_5 Forward Primer
accctctgatttcatggctg

SEQ ID NO: 20128 - DNA, 20 bp, Artificial Sequence
  Chr20q_5 Forward Primer
ggtttcatttgcctacctgc

SEQ ID NO: 20129 - DNA, 20 bp, Artificial Sequence
  Chr20q_5 Forward Primer
tcaagctgttagggcaggtt

SEQ ID NO: 20130 - DNA, 20 bp, Artificial Sequence
  Chr20q_5 Forward Primer
tgcctggaacatagtggaca

SEQ ID NO: 20131 - DNA, 20 bp, Artificial Sequence
  Chr20q_5 Forward Primer
tggcaatagggagtggtagg

SEQ ID NO: 20132 - DNA, 21 bp, Artificial Sequence
  Chr20q_5 Forward Primer
tcctcacctaccttcatccct

SEQ ID NO: 20133 - DNA, 20 bp, Artificial Sequence
  Chr20q_5 Forward Primer
ccatccagaaatggaaaagc

SEQ ID NO: 20134 - DNA, 21 bp, Artificial Sequence
  Chr20q_5 Forward Primer
ttttgttttgttttgtgggct

SEQ ID NO: 20135 - DNA, 21 bp, Artificial Sequence
  Chr20q_5 Forward Primer
aagctcctggctgtttagtca

SEQ ID NO: 20136 - DNA, 26 bp, Artificial Sequence
  Chr20q_5 Forward Primer
tgatacataatccttaaaatgcctga

SEQ ID NO: 20137 - DNA, 21 bp, Artificial Sequence
  Chr20q_5 Forward Primer
tcacattccatacacaccagc

SEQ ID NO: 20138 - DNA, 20 bp, Artificial Sequence
  Chr20q_5 Forward Primer
ggtgactcacacaccacctg

SEQ ID NO: 20139 - DNA, 20 bp, Artificial Sequence
  Chr20q_5 Forward Primer
aagaggtcctttttggggac

SEQ ID NO: 20140 - DNA, 25 bp, Artificial Sequence
  Chr20q_5 Forward Primer
gaaaggagagtgtaaaaaccactga

SEQ ID NO: 20141 - DNA, 20 bp, Artificial Sequence
  Chr20q_5 Forward Primer
ttgtgttcttttgcagtgcc

SEQ ID NO: 20142 - DNA, 20 bp, Artificial Sequence
  Chr20q_5 Forward Primer
ccctagcttcttggagcctt

SEQ ID NO: 20143 - DNA, 20 bp, Artificial Sequence
  Chr20q_5 Forward Primer
caaaagtcctcaggaggcaa

SEQ ID NO: 20144 - DNA, 20 bp, Artificial Sequence
  Chr20q_5 Forward Primer
tggagactggagccatatca

SEQ ID NO: 20145 - DNA, 20 bp, Artificial Sequence
  Chr20q_5 Forward Primer
aagctcagtgcccaacatct

SEQ ID NO: 20146 - DNA, 21 bp, Artificial Sequence
  Chr20q_5 Forward Primer
gctacttcttgctatgcctgg

SEQ ID NO: 20147 - DNA, 20 bp, Artificial Sequence
  Chr20q_5 Forward Primer
ccacttacccccaggctact

SEQ ID NO: 20148 - DNA, 20 bp, Artificial Sequence
  Chr20q_5 Forward Primer
gaagtcaggccaagaagctg

SEQ ID NO: 20149 - DNA, 20 bp, Artificial Sequence
  Chr20q_5 Forward Primer
ccccctgcttgatttctgta

SEQ ID NO: 20150 - DNA, 20 bp, Artificial Sequence
  Chr20q_5 Forward Primer
tgctttgggagagcaatctt

SEQ ID NO: 20151 - DNA, 20 bp, Artificial Sequence
  Chr20q_5 Forward Primer
ggttagccaaagccaactga

SEQ ID NO: 20152 - DNA, 20 bp, Artificial Sequence
  Chr20q_5 Forward Primer
ggaaagctgagcatgtagcc

SEQ ID NO: 20153 - DNA, 27 bp, Artificial Sequence
  Chr20q_5 Forward Primer
tcattagaacattaactcaattaacca

SEQ ID NO: 20154 - DNA, 23 bp, Artificial Sequence
  Chr20q_5 Forward Primer
aactcaaccacattttagccaga

SEQ ID NO: 20155 - DNA, 20 bp, Artificial Sequence
  Chr20q_5 Forward Primer
tcaaaatgttgcttgcagtg

SEQ ID NO: 20156 - DNA, 20 bp, Artificial Sequence
  Chr20q_5 Forward Primer
aaaatttcccaaagactgcg

SEQ ID NO: 20157 - DNA, 20 bp, Artificial Sequence
  Chr20q_5 Forward Primer
cgctctaacctgagaccgac

SEQ ID NO: 20158 - DNA, 20 bp, Artificial Sequence
  Chr20q_5 Forward Primer
aatttgtgccctgattttgc

SEQ ID NO: 20159 - DNA, 20 bp, Artificial Sequence
  Chr20q_5 Forward Primer
caagccctaccctgaccata

SEQ ID NO: 20160 - DNA, 20 bp, Artificial Sequence
  Chr20q_5 Forward Primer
ctcctcccagagaaatgcac

SEQ ID NO: 20161 - DNA, 20 bp, Artificial Sequence
  Chr20q_5 Forward Primer
cttaaagcaccccaaaatgg

SEQ ID NO: 20162 - DNA, 20 bp, Artificial Sequence
  Chr20q_5 Forward Primer
ctttcttgaaactgcacccc

SEQ ID NO: 20163 - DNA, 20 bp, Artificial Sequence
  Chr20q_5 Forward Primer
agcaactgggaacttggagt

SEQ ID NO: 20164 - DNA, 22 bp, Artificial Sequence
  Chr20q_5 Forward Primer
tgccttatcattacagcaaatg

SEQ ID NO: 20165 - DNA, 21 bp, Artificial Sequence
  Chr20q_5 Forward Primer
tgcttctcagattgtgtccaa

SEQ ID NO: 20166 - DNA, 21 bp, Artificial Sequence
  Chr20q_5 Forward Primer
tcagctatgcaatcttgagca

SEQ ID NO: 20167 - DNA, 20 bp, Artificial Sequence
  Chr20q_5 Forward Primer
atgtttatgggggaggggta

SEQ ID NO: 20168 - DNA, 20 bp, Artificial Sequence
  Chr20q_5 Forward Primer
atggatgcctacagtgggtc

SEQ ID NO: 20169 - DNA, 18 bp, Artificial Sequence
  Chr20q_5 Forward Primer
cagcccaggctgattcat

SEQ ID NO: 20170 - DNA, 20 bp, Artificial Sequence
  Chr20q_5 Forward Primer
tatgtttgctacggaacccc

SEQ ID NO: 20171 - DNA, 20 bp, Artificial Sequence
  Chr20q_5 Forward Primer
gcactagtgaacccacccag

SEQ ID NO: 20172 - DNA, 20 bp, Artificial Sequence
  Chr20q_5 Forward Primer
caggcagtgggttaagtgct

SEQ ID NO: 20173 - DNA, 21 bp, Artificial Sequence
  Chr20q_5 Forward Primer
ggtccagcctcattaacagtg

SEQ ID NO: 20174 - DNA, 20 bp, Artificial Sequence
  Chr20q_5 Forward Primer
cccagacatatgcccagact

SEQ ID NO: 20175 - DNA, 20 bp, Artificial Sequence
  Chr20q_5 Forward Primer
ttaacaccagaagccacacg

SEQ ID NO: 20176 - DNA, 22 bp, Artificial Sequence
  Chr20q_5 Forward Primer
cacagagcaagtgagaatccaa

SEQ ID NO: 20177 - DNA, 26 bp, Artificial Sequence
  Chr20q_5 Forward Primer
tgaaagcttttcaactaaaaatgaga

SEQ ID NO: 20178 - DNA, 20 bp, Artificial Sequence
  Chr20q_5 Forward Primer
aagctaggaaagggcagaca

SEQ ID NO: 20179 - DNA, 22 bp, Artificial Sequence
  Chr20q_5 Forward Primer
tggctcaaaagacagtgagact

SEQ ID NO: 20180 - DNA, 20 bp, Artificial Sequence
  Chr20q_5 Forward Primer
ggtccagtgttggaggtttt

SEQ ID NO: 20181 - DNA, 20 bp, Artificial Sequence
  Chr20q_5 Forward Primer
catctgtagcagccatggaa

SEQ ID NO: 20182 - DNA, 27 bp, Artificial Sequence
  Chr20q_5 Forward Primer
tgctaactctatttttcctaagacacc

SEQ ID NO: 20183 - DNA, 20 bp, Artificial Sequence
  Chr20q_5 Forward Primer
ggaagaacctggaaggaagg

SEQ ID NO: 20184 - DNA, 22 bp, Artificial Sequence
  Chr20q_5 Forward Primer
tggccaaatttaaaacagacaa

SEQ ID NO: 20185 - DNA, 20 bp, Artificial Sequence
  Chr20q_5 Forward Primer
ggagtgaagacagacagccc

SEQ ID NO: 20186 - DNA, 20 bp, Artificial Sequence
  Chr20q_5 Forward Primer
ttttccaaaacagtttgccc

SEQ ID NO: 20187 - DNA, 20 bp, Artificial Sequence
  Chr20q_5 Forward Primer
ccactggtctccaaatggtt

SEQ ID NO: 20188 - DNA, 20 bp, Artificial Sequence
  Chr20q_5 Forward Primer
tctatgctctgccacccact

SEQ ID NO: 20189 - DNA, 21 bp, Artificial Sequence
  Chr20q_5 Forward Primer
aggagtcatccattgagcaga

SEQ ID NO: 20190 - DNA, 23 bp, Artificial Sequence
  Chr20q_5 Forward Primer
ggtgctattttagctctaaacgg

SEQ ID NO: 20191 - DNA, 20 bp, Artificial Sequence
  Chr20q_5 Forward Primer
ggcgatttgaggctattcct

SEQ ID NO: 20192 - DNA, 20 bp, Artificial Sequence
  Chr20q_5 Forward Primer
tgccgaagtcattagaaggg

SEQ ID NO: 20193 - DNA, 20 bp, Artificial Sequence
  Chr20q_5 Forward Primer
agccaccaccctttctctct

SEQ ID NO: 20194 - DNA, 20 bp, Artificial Sequence
  Chr20q_5 Forward Primer
cacccatcagtgagggaaat

SEQ ID NO: 20195 - DNA, 20 bp, Artificial Sequence
  Chr20q_5 Forward Primer
gcattgggaggatatccaga

SEQ ID NO: 20196 - DNA, 19 bp, Artificial Sequence
  Chr20q_5 Forward Primer
ccctgctcactgggttgta

SEQ ID NO: 20197 - DNA, 20 bp, Artificial Sequence
  Chr20q_5 Forward Primer
catgcatgctgcttgctaat

SEQ ID NO: 20198 - DNA, 22 bp, Artificial Sequence
  Chr20q_5 Forward Primer
ttcaatttgcttgaatttctcg

SEQ ID NO: 20199 - DNA, 20 bp, Artificial Sequence
  Chr20q_5 Forward Primer
catttgggaggtgtccctta

SEQ ID NO: 20200 - DNA, 20 bp, Artificial Sequence
  Chr20q_5 Forward Primer
aaaggcagatctggggaaac

SEQ ID NO: 20201 - DNA, 20 bp, Artificial Sequence
  Chr20q_5 Forward Primer
ggcttttgacttggtggaaa

SEQ ID NO: 20202 - DNA, 22 bp, Artificial Sequence
  Chr20q_5 Forward Primer
gaaaccacttctccttttccaa

SEQ ID NO: 20203 - DNA, 21 bp, Artificial Sequence
  Chr20q_5 Forward Primer
tgacatttgggaaatactggg

SEQ ID NO: 20204 - DNA, 20 bp, Artificial Sequence
  Chr20q_5 Forward Primer
tgctttttcttggtgcctct

SEQ ID NO: 20205 - DNA, 20 bp, Artificial Sequence
  Chr20q_5 Forward Primer
cccagatgaacacacctcaa

SEQ ID NO: 20206 - DNA, 20 bp, Artificial Sequence
  Chr20q_5 Forward Primer
agggagatcgaaaccgaaat

SEQ ID NO: 20207 - DNA, 20 bp, Artificial Sequence
  Chr20q_5 Forward Primer
attctgggtcagggaggagt

SEQ ID NO: 20208 - DNA, 20 bp, Artificial Sequence
  Chr20q_5 Forward Primer
gccacaccttcattcaacct

SEQ ID NO: 20209 - DNA, 20 bp, Artificial Sequence
  Chr20q_5 Forward Primer
gaggtaacgagccttgtcca

SEQ ID NO: 20210 - DNA, 20 bp, Artificial Sequence
  Chr20q_5 Forward Primer
taccgtgtcttctgggtcct

SEQ ID NO: 20211 - DNA, 20 bp, Artificial Sequence
  Chr20q_5 Forward Primer
caaacacatgtgcaaccctc

SEQ ID NO: 20212 - DNA, 20 bp, Artificial Sequence
  Chr20q_5 Forward Primer
acatgatttgggcatccact

SEQ ID NO: 20213 - DNA, 20 bp, Artificial Sequence
  Chr20q_5 Reverse Primer
tcatttagcacaatgcccag

SEQ ID NO: 20214 - DNA, 20 bp, Artificial Sequence
  Chr20q_5 Reverse Primer
gaggggacatcccataaaca

SEQ ID NO: 20215 - DNA, 20 bp, Artificial Sequence
  Chr20q_5 Reverse Primer
agccacagtgtaaaggccac

SEQ ID NO: 20216 - DNA, 20 bp, Artificial Sequence
  Chr20q_5 Reverse Primer
tcttctccaagggctctcaa

SEQ ID NO: 20217 - DNA, 23 bp, Artificial Sequence
  Chr20q_5 Reverse Primer
ttgctcaatatcacactggaaaa

SEQ ID NO: 20218 - DNA, 20 bp, Artificial Sequence
  Chr20q_5 Reverse Primer
tgtgaactgaccaccaaaca

SEQ ID NO: 20219 - DNA, 21 bp, Artificial Sequence
  Chr20q_5 Reverse Primer
catttcaagtgagcattgtgg

SEQ ID NO: 20220 - DNA, 20 bp, Artificial Sequence
  Chr20q_5 Reverse Primer
caaccacatgctccattgtt

SEQ ID NO: 20221 - DNA, 20 bp, Artificial Sequence
  Chr20q_5 Reverse Primer
aacaagtgctctctctgccc

SEQ ID NO: 20222 - DNA, 20 bp, Artificial Sequence
  Chr20q_5 Reverse Primer
agggtggtctgtgacggtag

SEQ ID NO: 20223 - DNA, 21 bp, Artificial Sequence
  Chr20q_5 Reverse Primer
cacttgaaaatgctttcctcc

SEQ ID NO: 20224 - DNA, 20 bp, Artificial Sequence
  Chr20q_5 Reverse Primer
acttcacagaaatcctgcgg

SEQ ID NO: 20225 - DNA, 20 bp, Artificial Sequence
  Chr20q_5 Reverse Primer
ttatttcagctgcttcgcaa

SEQ ID NO: 20226 - DNA, 20 bp, Artificial Sequence
  Chr20q_5 Reverse Primer
ccctttccctgtgggtattt

SEQ ID NO: 20227 - DNA, 20 bp, Artificial Sequence
  Chr20q_5 Reverse Primer
attaccagttgcccacgaaa

SEQ ID NO: 20228 - DNA, 21 bp, Artificial Sequence
  Chr20q_5 Reverse Primer
aaaccactcacagcatccatc

SEQ ID NO: 20229 - DNA, 20 bp, Artificial Sequence
  Chr20q_5 Reverse Primer
ggccaaaaccccatctatct

SEQ ID NO: 20230 - DNA, 23 bp, Artificial Sequence
  Chr20q_5 Reverse Primer
gcaacaaaacctaaatcagttgg

SEQ ID NO: 20231 - DNA, 21 bp, Artificial Sequence
  Chr20q_5 Reverse Primer
ctgaaggtgacgtgagtgaca

SEQ ID NO: 20232 - DNA, 20 bp, Artificial Sequence
  Chr20q_5 Reverse Primer
ttaattgtggttgcgtccaa

SEQ ID NO: 20233 - DNA, 20 bp, Artificial Sequence
  Chr20q_5 Reverse Primer
gacctcaacgaaggagatgc

SEQ ID NO: 20234 - DNA, 20 bp, Artificial Sequence
  Chr20q_5 Reverse Primer
ttggaaattggtgcgttgta

SEQ ID NO: 20235 - DNA, 20 bp, Artificial Sequence
  Chr20q_5 Reverse Primer
atagttgcaggggaactgga

SEQ ID NO: 20236 - DNA, 20 bp, Artificial Sequence
  Chr20q_5 Reverse Primer
cagaggcagaggaaatcgag

SEQ ID NO: 20237 - DNA, 20 bp, Artificial Sequence
  Chr20q_5 Reverse Primer
ctatccttagcccaggagcc

SEQ ID NO: 20238 - DNA, 20 bp, Artificial Sequence
  Chr20q_5 Reverse Primer
tttactgatgggcaactccc

SEQ ID NO: 20239 - DNA, 20 bp, Artificial Sequence
  Chr20q_5 Reverse Primer
atagattggggtccaaagcc

SEQ ID NO: 20240 - DNA, 21 bp, Artificial Sequence
  Chr20q_5 Reverse Primer
gatgtgatttagagcccagca

SEQ ID NO: 20241 - DNA, 20 bp, Artificial Sequence
  Chr20q_5 Reverse Primer
ggatatgtgcatggtgccta

SEQ ID NO: 20242 - DNA, 20 bp, Artificial Sequence
  Chr20q_5 Reverse Primer
tacattgagttgccgcagaa

SEQ ID NO: 20243 - DNA, 21 bp, Artificial Sequence
  Chr20q_5 Reverse Primer
tgcacacgaagaaagaactca

SEQ ID NO: 20244 - DNA, 20 bp, Artificial Sequence
  Chr20q_5 Reverse Primer
tgcagatgcggtcatatgtt

SEQ ID NO: 20245 - DNA, 21 bp, Artificial Sequence
  Chr20q_5 Reverse Primer
tggacgaaatctatttgccat

SEQ ID NO: 20246 - DNA, 20 bp, Artificial Sequence
  Chr20q_5 Reverse Primer
aagtcacacatcaatgggca

SEQ ID NO: 20247 - DNA, 20 bp, Artificial Sequence
  Chr20q_5 Reverse Primer
gtagcaaccctgcatgtcct

SEQ ID NO: 20248 - DNA, 23 bp, Artificial Sequence
  Chr20q_5 Reverse Primer
gaccatggaaacaggtacttctg

SEQ ID NO: 20249 - DNA, 25 bp, Artificial Sequence
  Chr20q_5 Reverse Primer
tgatgtcaacatttctcaaagtttc

SEQ ID NO: 20250 - DNA, 21 bp, Artificial Sequence
  Chr20q_5 Reverse Primer
agctgactcagtgtccatgtg

SEQ ID NO: 20251 - DNA, 22 bp, Artificial Sequence
  Chr20q_5 Reverse Primer
tgatctctaacaggcaaacagg

SEQ ID NO: 20252 - DNA, 20 bp, Artificial Sequence
  Chr20q_5 Reverse Primer
gagcctcacagttttcctgg

SEQ ID NO: 20253 - DNA, 20 bp, Artificial Sequence
  Chr20q_5 Reverse Primer
cacgtaagaacagctttgcg

SEQ ID NO: 20254 - DNA, 20 bp, Artificial Sequence
  Chr20q_5 Reverse Primer
acggcagaatcattccattc

SEQ ID NO: 20255 - DNA, 20 bp, Artificial Sequence
  Chr20q_5 Reverse Primer
cacttggggcaggactgtat

SEQ ID NO: 20256 - DNA, 20 bp, Artificial Sequence
  Chr20q_5 Reverse Primer
gcaagatgcctagtgcagaa

SEQ ID NO: 20257 - DNA, 20 bp, Artificial Sequence
  Chr20q_5 Reverse Primer
aaggaattcacacgattgcc

SEQ ID NO: 20258 - DNA, 20 bp, Artificial Sequence
  Chr20q_5 Reverse Primer
actgggacaggaaaaagggt

SEQ ID NO: 20259 - DNA, 20 bp, Artificial Sequence
  Chr20q_5 Reverse Primer
cccaaaatgagtgctttgct

SEQ ID NO: 20260 - DNA, 24 bp, Artificial Sequence
  Chr20q_5 Reverse Primer
tgcatttatctcctgttttcattc

SEQ ID NO: 20261 - DNA, 21 bp, Artificial Sequence
  Chr20q_5 Reverse Primer
ttgggttctgagcagattttc

SEQ ID NO: 20262 - DNA, 20 bp, Artificial Sequence
  Chr20q_5 Reverse Primer
agaggaaccatgtgggtttg

SEQ ID NO: 20263 - DNA, 20 bp, Artificial Sequence
  Chr20q_5 Reverse Primer
cccagaaccactatttccca

SEQ ID NO: 20264 - DNA, 20 bp, Artificial Sequence
  Chr20q_5 Reverse Primer
gagatgatccgtgccaattt

SEQ ID NO: 20265 - DNA, 20 bp, Artificial Sequence
  Chr20q_5 Reverse Primer
agccagtgtcatttcttccc

SEQ ID NO: 20266 - DNA, 20 bp, Artificial Sequence
  Chr20q_5 Reverse Primer
tcaaaataacggcacaatgg

SEQ ID NO: 20267 - DNA, 20 bp, Artificial Sequence
  Chr20q_5 Reverse Primer
gcatgctaagaagctggagg

SEQ ID NO: 20268 - DNA, 20 bp, Artificial Sequence
  Chr20q_5 Reverse Primer
aagatgctcaaagaggacgc

SEQ ID NO: 20269 - DNA, 20 bp, Artificial Sequence
  Chr20q_5 Reverse Primer
ggcaaatgctggcttaagtg

SEQ ID NO: 20270 - DNA, 20 bp, Artificial Sequence
  Chr20q_5 Reverse Primer
cccgattctgaaacaacgaa

SEQ ID NO: 20271 - DNA, 20 bp, Artificial Sequence
  Chr20q_5 Reverse Primer
ccctggacaaattggttgac

SEQ ID NO: 20272 - DNA, 20 bp, Artificial Sequence
  Chr20q_5 Reverse Primer
ttcccagaacaggctatgga

SEQ ID NO: 20273 - DNA, 20 bp, Artificial Sequence
  Chr20q_5 Reverse Primer
agcagaaagcaaaatgagga

SEQ ID NO: 20274 - DNA, 20 bp, Artificial Sequence
  Chr20q_5 Reverse Primer
caaaaaccaaatcccctgtg

SEQ ID NO: 20275 - DNA, 20 bp, Artificial Sequence
  Chr20q_5 Reverse Primer
caggccgacgtctttatctt

SEQ ID NO: 20276 - DNA, 20 bp, Artificial Sequence
  Chr20q_5 Reverse Primer
ggtgtgccagtggctaaagt

SEQ ID NO: 20277 - DNA, 20 bp, Artificial Sequence
  Chr20q_5 Reverse Primer
ccaagccaatggagaatcat

SEQ ID NO: 20278 - DNA, 21 bp, Artificial Sequence
  Chr20q_5 Reverse Primer
ctttttcttcatcacccacca

SEQ ID NO: 20279 - DNA, 20 bp, Artificial Sequence
  Chr20q_5 Reverse Primer
gggtgtgggtggaattcata

SEQ ID NO: 20280 - DNA, 20 bp, Artificial Sequence
  Chr20q_5 Reverse Primer
agggtgtccatcagttcacc

SEQ ID NO: 20281 - DNA, 20 bp, Artificial Sequence
  Chr20q_5 Reverse Primer
gtgtttcgtggggaagaaaa

SEQ ID NO: 20282 - DNA, 20 bp, Artificial Sequence
  Chr20q_5 Reverse Primer
aagtcacccaccacttcagc

SEQ ID NO: 20283 - DNA, 20 bp, Artificial Sequence
  Chr20q_5 Reverse Primer
cagtcatccccaaagtggag

SEQ ID NO: 20284 - DNA, 20 bp, Artificial Sequence
  Chr20q_5 Reverse Primer
ccctgggaatttaaagggat

SEQ ID NO: 20285 - DNA, 20 bp, Artificial Sequence
  Chr20q_5 Reverse Primer
tgggacgtttgtaatgcaga

SEQ ID NO: 20286 - DNA, 20 bp, Artificial Sequence
  Chr20q_5 Reverse Primer
ggacatgtaaccccagcact

SEQ ID NO: 20287 - DNA, 20 bp, Artificial Sequence
  Chr20q_5 Reverse Primer
gccactctttgctccgatac

SEQ ID NO: 20288 - DNA, 20 bp, Artificial Sequence
  Chr20q_5 Reverse Primer
tcccaggtaaattctggcac

SEQ ID NO: 20289 - DNA, 21 bp, Artificial Sequence
  Chr20q_5 Reverse Primer
cccccgaaaatatgtaaaact

SEQ ID NO: 20290 - DNA, 20 bp, Artificial Sequence
  Chr20q_5 Reverse Primer
ttttgccctaatcacccttc

SEQ ID NO: 20291 - DNA, 20 bp, Artificial Sequence
  Chr20q_5 Reverse Primer
aagctaggcctgatgggaat

SEQ ID NO: 20292 - DNA, 20 bp, Artificial Sequence
  Chr20q_5 Reverse Primer
gtgctaaatctggcaaccct

SEQ ID NO: 20293 - DNA, 20 bp, Artificial Sequence
  Chr20q_5 Reverse Primer
atttttctcggcctaatggc

SEQ ID NO: 20294 - DNA, 20 bp, Artificial Sequence
  Chr20q_5 Reverse Primer
ggcttttacctctgcacctg

SEQ ID NO: 20295 - DNA, 20 bp, Artificial Sequence
  Chr20q_5 Reverse Primer
attcctagggcttcccaaaa

SEQ ID NO: 20296 - DNA, 20 bp, Artificial Sequence
  Chr20q_5 Reverse Primer
taaatattgcaacgggggag

SEQ ID NO: 20297 - DNA, 20 bp, Artificial Sequence
  Chr20q_5 Reverse Primer
caatgaatgaaggcagagca

SEQ ID NO: 20298 - DNA, 22 bp, Artificial Sequence
  Chr20q_5 Reverse Primer
ggaaggtaagcattaatttggc

SEQ ID NO: 20299 - DNA, 20 bp, Artificial Sequence
  Chr20q_5 Reverse Primer
acaagacatgtgccatcctg

SEQ ID NO: 20300 - DNA, 20 bp, Artificial Sequence
  Chr20q_5 Reverse Primer
aggggatggtgtaccaacag

SEQ ID NO: 20301 - DNA, 20 bp, Artificial Sequence
  Chr20q_5 Reverse Primer
cagcagcagtctttgctttg

SEQ ID NO: 20302 - DNA, 20 bp, Artificial Sequence
  Chr20q_5 Reverse Primer
gtccatgacacccacaaaca

SEQ ID NO: 20303 - DNA, 20 bp, Artificial Sequence
  Chr20q_5 Reverse Primer
tccgaggtcatagggtcaag

SEQ ID NO: 20304 - DNA, 20 bp, Artificial Sequence
  Chr20q_5 Reverse Primer
ttgccccctacatctgctac

SEQ ID NO: 20305 - DNA, 20 bp, Artificial Sequence
  Chr20q_5 Reverse Primer
aaggcagtggtttggtgaaa

SEQ ID NO: 20306 - DNA, 20 bp, Artificial Sequence
  Chr20q_5 Reverse Primer
aacttttgtattacccggcg

SEQ ID NO: 20307 - DNA, 20 bp, Artificial Sequence
  Chr20q_5 Reverse Primer
caaagcagttttgccactca

SEQ ID NO: 20308 - DNA, 20 bp, Artificial Sequence
  Chr20q_5 Reverse Primer
cccctccactctattgctca

SEQ ID NO: 20309 - DNA, 20 bp, Artificial Sequence
  Chr20q_6 Forward Primer
aggcttgtcctggagaggtt

SEQ ID NO: 20310 - DNA, 20 bp, Artificial Sequence
  Chr20q_6 Forward Primer
catccctatgatttgccagg

SEQ ID NO: 20311 - DNA, 20 bp, Artificial Sequence
  Chr20q_6 Forward Primer
ctgctgaagccacttgaaaa

SEQ ID NO: 20312 - DNA, 20 bp, Artificial Sequence
  Chr20q_6 Forward Primer
agaaggagctctccaaaggg

SEQ ID NO: 20313 - DNA, 20 bp, Artificial Sequence
  Chr20q_6 Forward Primer
agggaacccagaagtccagt

SEQ ID NO: 20314 - DNA, 20 bp, Artificial Sequence
  Chr20q_6 Forward Primer
taacccaagcattctgaccc

SEQ ID NO: 20315 - DNA, 20 bp, Artificial Sequence
  Chr20q_6 Forward Primer
tgatgatggtgatggagacg

SEQ ID NO: 20316 - DNA, 20 bp, Artificial Sequence
  Chr20q_6 Forward Primer
ttttctagccaccagccagt

SEQ ID NO: 20317 - DNA, 23 bp, Artificial Sequence
  Chr20q_6 Forward Primer
tctatagtgacctgagagccctg

SEQ ID NO: 20318 - DNA, 20 bp, Artificial Sequence
  Chr20q_6 Forward Primer
gagagagtgtggctggaagg

SEQ ID NO: 20319 - DNA, 20 bp, Artificial Sequence
  Chr20q_6 Forward Primer
cctaggagaggggaaactgc

SEQ ID NO: 20320 - DNA, 25 bp, Artificial Sequence
  Chr20q_6 Forward Primer
gctgtaatgacctcctaaaggtctc

SEQ ID NO: 20321 - DNA, 20 bp, Artificial Sequence
  Chr20q_6 Forward Primer
gtctgctaggagcatgggag

SEQ ID NO: 20322 - DNA, 20 bp, Artificial Sequence
  Chr20q_6 Forward Primer
ttccgcacacagaagtcaac

SEQ ID NO: 20323 - DNA, 20 bp, Artificial Sequence
  Chr20q_6 Forward Primer
gcagagcaggaaaaggtgac

SEQ ID NO: 20324 - DNA, 20 bp, Artificial Sequence
  Chr20q_6 Forward Primer
tttcccactttttccagagc

SEQ ID NO: 20325 - DNA, 20 bp, Artificial Sequence
  Chr20q_6 Forward Primer
taatcagaggaggccacacc

SEQ ID NO: 20326 - DNA, 20 bp, Artificial Sequence
  Chr20q_6 Forward Primer
gagacctgtggttctcagcc

SEQ ID NO: 20327 - DNA, 20 bp, Artificial Sequence
  Chr20q_6 Forward Primer
actctccgagggtcaaggat

SEQ ID NO: 20328 - DNA, 20 bp, Artificial Sequence
  Chr20q_6 Forward Primer
tgaccatcaggatgtacgga

SEQ ID NO: 20329 - DNA, 20 bp, Artificial Sequence
  Chr20q_6 Forward Primer
tcaacaaacccgaagtcctc

SEQ ID NO: 20330 - DNA, 20 bp, Artificial Sequence
  Chr20q_6 Forward Primer
tctgtccatggttgagtcca

SEQ ID NO: 20331 - DNA, 20 bp, Artificial Sequence
  Chr20q_6 Forward Primer
tttcctcgtaggtcattggg

SEQ ID NO: 20332 - DNA, 20 bp, Artificial Sequence
  Chr20q_6 Forward Primer
gatgttctacgggccttctg

SEQ ID NO: 20333 - DNA, 19 bp, Artificial Sequence
  Chr20q_6 Forward Primer
actgagctgcaccctgagc

SEQ ID NO: 20334 - DNA, 20 bp, Artificial Sequence
  Chr20q_6 Forward Primer
cactcgggaggttcattcat

SEQ ID NO: 20335 - DNA, 20 bp, Artificial Sequence
  Chr20q_6 Forward Primer
gcaccttgctgcttcagtct

SEQ ID NO: 20336 - DNA, 20 bp, Artificial Sequence
  Chr20q_6 Forward Primer
ggccaaagattgatcttcca

SEQ ID NO: 20337 - DNA, 20 bp, Artificial Sequence
  Chr20q_6 Forward Primer
ttataggggacctggggaag

SEQ ID NO: 20338 - DNA, 20 bp, Artificial Sequence
  Chr20q_6 Forward Primer
tccaaggcagaacagggtag

SEQ ID NO: 20339 - DNA, 20 bp, Artificial Sequence
  Chr20q_6 Forward Primer
atgcaggatggaaaggtctg

SEQ ID NO: 20340 - DNA, 20 bp, Artificial Sequence
  Chr20q_6 Forward Primer
gctcctttctgttcctcgaa

SEQ ID NO: 20341 - DNA, 20 bp, Artificial Sequence
  Chr20q_6 Forward Primer
caacagtgcctagcacagga

SEQ ID NO: 20342 - DNA, 20 bp, Artificial Sequence
  Chr20q_6 Forward Primer
aagcctagcccttcatcaca

SEQ ID NO: 20343 - DNA, 20 bp, Artificial Sequence
  Chr20q_6 Forward Primer
aggaaatgcagttgagcctg

SEQ ID NO: 20344 - DNA, 20 bp, Artificial Sequence
  Chr20q_6 Forward Primer
ctttccggagatggcctagt

SEQ ID NO: 20345 - DNA, 20 bp, Artificial Sequence
  Chr20q_6 Forward Primer
tgaacatccttacacgtgcc

SEQ ID NO: 20346 - DNA, 20 bp, Artificial Sequence
  Chr20q_6 Forward Primer
aattgtttcccgtctgttgg

SEQ ID NO: 20347 - DNA, 20 bp, Artificial Sequence
  Chr20q_6 Forward Primer
tggagcttctgcaagaatga

SEQ ID NO: 20348 - DNA, 20 bp, Artificial Sequence
  Chr20q_6 Forward Primer
cacatccagctttgagagca

SEQ ID NO: 20349 - DNA, 20 bp, Artificial Sequence
  Chr20q_6 Forward Primer
tcctgagtggtacattggca

SEQ ID NO: 20350 - DNA, 20 bp, Artificial Sequence
  Chr20q_6 Forward Primer
agaagccagaggagtgggtt

SEQ ID NO: 20351 - DNA, 20 bp, Artificial Sequence
  Chr20q_6 Forward Primer
agaatgaaaccagcacaggg

SEQ ID NO: 20352 - DNA, 20 bp, Artificial Sequence
  Chr20q_6 Forward Primer
tggttaagatgggagggttg

SEQ ID NO: 20353 - DNA, 20 bp, Artificial Sequence
  Chr20q_6 Forward Primer
atggtgggaaggctagtgtg

SEQ ID NO: 20354 - DNA, 19 bp, Artificial Sequence
  Chr20q_6 Forward Primer
atttaggtggggcctgttg

SEQ ID NO: 20355 - DNA, 20 bp, Artificial Sequence
  Chr20q_6 Forward Primer
gcccagcttggttcaactta

SEQ ID NO: 20356 - DNA, 20 bp, Artificial Sequence
  Chr20q_6 Forward Primer
ggagatgcaaattccctgaa

SEQ ID NO: 20357 - DNA, 20 bp, Artificial Sequence
  Chr20q_6 Forward Primer
tttggggacacagaacacac

SEQ ID NO: 20358 - DNA, 20 bp, Artificial Sequence
  Chr20q_6 Forward Primer
gtccagaacaagaagctcgg

SEQ ID NO: 20359 - DNA, 20 bp, Artificial Sequence
  Chr20q_6 Forward Primer
gtgtgtgtcccactgctgac

SEQ ID NO: 20360 - DNA, 20 bp, Artificial Sequence
  Chr20q_6 Forward Primer
caggccaagaatgagtcaca

SEQ ID NO: 20361 - DNA, 20 bp, Artificial Sequence
  Chr20q_6 Forward Primer
ctgttaggctcttgggttgc

SEQ ID NO: 20362 - DNA, 20 bp, Artificial Sequence
  Chr20q_6 Forward Primer
ccagagaagtagacagggcg

SEQ ID NO: 20363 - DNA, 20 bp, Artificial Sequence
  Chr20q_6 Forward Primer
cctgctttgtgaggtgatga

SEQ ID NO: 20364 - DNA, 20 bp, Artificial Sequence
  Chr20q_6 Forward Primer
tctctgtctttggatggcct

SEQ ID NO: 20365 - DNA, 21 bp, Artificial Sequence
  Chr20q_6 Forward Primer
ttctccgtgagagaaaaagca

SEQ ID NO: 20366 - DNA, 19 bp, Artificial Sequence
  Chr20q_6 Forward Primer
ggtcctttgttggaacccc

SEQ ID NO: 20367 - DNA, 19 bp, Artificial Sequence
  Chr20q_6 Forward Primer
aagtcgaggtgcttagggc

SEQ ID NO: 20368 - DNA, 20 bp, Artificial Sequence
  Chr20q_6 Forward Primer
tcgtggttgtttgtcggata

SEQ ID NO: 20369 - DNA, 20 bp, Artificial Sequence
  Chr20q_6 Forward Primer
ctagtgcctggacccagttg

SEQ ID NO: 20370 - DNA, 20 bp, Artificial Sequence
  Chr20q_6 Forward Primer
ccggagaagaggagtgagaa

SEQ ID NO: 20371 - DNA, 20 bp, Artificial Sequence
  Chr20q_6 Forward Primer
tgagtcacagccagacctca

SEQ ID NO: 20372 - DNA, 20 bp, Artificial Sequence
  Chr20q_6 Forward Primer
agagatcgaagtctgccctg

SEQ ID NO: 20373 - DNA, 20 bp, Artificial Sequence
  Chr20q_6 Forward Primer
agccctctgcattcacgtag

SEQ ID NO: 20374 - DNA, 20 bp, Artificial Sequence
  Chr20q_6 Forward Primer
tgcgtttgtgagactcaagg

SEQ ID NO: 20375 - DNA, 20 bp, Artificial Sequence
  Chr20q_6 Forward Primer
atcccaggaccacattcttg

SEQ ID NO: 20376 - DNA, 20 bp, Artificial Sequence
  Chr20q_6 Forward Primer
gtgtgagcggtttcaggaat

SEQ ID NO: 20377 - DNA, 20 bp, Artificial Sequence
  Chr20q_6 Forward Primer
cttgattttgtgctgcctca

SEQ ID NO: 20378 - DNA, 24 bp, Artificial Sequence
  Chr20q_6 Forward Primer
tcattgaaagcagtcatatcattt

SEQ ID NO: 20379 - DNA, 20 bp, Artificial Sequence
  Chr20q_6 Forward Primer
cggcgaaatgctaacaagac

SEQ ID NO: 20380 - DNA, 20 bp, Artificial Sequence
  Chr20q_6 Forward Primer
tggtgaaatgtcaaggcatc

SEQ ID NO: 20381 - DNA, 21 bp, Artificial Sequence
  Chr20q_6 Forward Primer
tcaggcaatttgaaaggaaga

SEQ ID NO: 20382 - DNA, 20 bp, Artificial Sequence
  Chr20q_6 Forward Primer
acctcaaagcaaagcacacc

SEQ ID NO: 20383 - DNA, 20 bp, Artificial Sequence
  Chr20q_6 Forward Primer
gggccagaaggaacctaaag

SEQ ID NO: 20384 - DNA, 20 bp, Artificial Sequence
  Chr20q_6 Forward Primer
acccagaattctttccaggc

SEQ ID NO: 20385 - DNA, 20 bp, Artificial Sequence
  Chr20q_6 Forward Primer
agttttgagtgccccatcac

SEQ ID NO: 20386 - DNA, 20 bp, Artificial Sequence
  Chr20q_6 Forward Primer
attatgccagccaagtgcag

SEQ ID NO: 20387 - DNA, 21 bp, Artificial Sequence
  Chr20q_6 Forward Primer
ggggttggagctactttgtta

SEQ ID NO: 20388 - DNA, 20 bp, Artificial Sequence
  Chr20q_6 Forward Primer
ccctttccgtgtgtaagctc

SEQ ID NO: 20389 - DNA, 23 bp, Artificial Sequence
  Chr20q_6 Forward Primer
gcaataggctagcatctttcttt

SEQ ID NO: 20390 - DNA, 23 bp, Artificial Sequence
  Chr20q_6 Forward Primer
ttttattttggcagtaacggaaa

SEQ ID NO: 20391 - DNA, 20 bp, Artificial Sequence
  Chr20q_6 Forward Primer
tggtaatttggtggcagaca

SEQ ID NO: 20392 - DNA, 20 bp, Artificial Sequence
  Chr20q_6 Forward Primer
ctctgtggcttcaagcaatg

SEQ ID NO: 20393 - DNA, 20 bp, Artificial Sequence
  Chr20q_6 Forward Primer
agggattttgtcttgcatca

SEQ ID NO: 20394 - DNA, 21 bp, Artificial Sequence
  Chr20q_6 Forward Primer
gaccctgatagagcagcttca

SEQ ID NO: 20395 - DNA, 20 bp, Artificial Sequence
  Chr20q_6 Forward Primer
accctctggtgtcatgcttc

SEQ ID NO: 20396 - DNA, 20 bp, Artificial Sequence
  Chr20q_6 Forward Primer
tgtctgcgggatgtaatttg

SEQ ID NO: 20397 - DNA, 22 bp, Artificial Sequence
  Chr20q_6 Forward Primer
gctcattttcaaaacaaccaca

SEQ ID NO: 20398 - DNA, 20 bp, Artificial Sequence
  Chr20q_6 Forward Primer
gtctcttcaggagctggacg

SEQ ID NO: 20399 - DNA, 20 bp, Artificial Sequence
  Chr20q_6 Forward Primer
aggctttgggaagatcgttt

SEQ ID NO: 20400 - DNA, 20 bp, Artificial Sequence
  Chr20q_6 Forward Primer
ctagcatcttgcccagaagg

SEQ ID NO: 20401 - DNA, 20 bp, Artificial Sequence
  Chr20q_6 Forward Primer
tgtccttaaaaccagtgggg

SEQ ID NO: 20402 - DNA, 20 bp, Artificial Sequence
  Chr20q_6 Forward Primer
acaccccaagaaacatctgg

SEQ ID NO: 20403 - DNA, 20 bp, Artificial Sequence
  Chr20q_6 Forward Primer
gagagcaggcgttctgagtt

SEQ ID NO: 20404 - DNA, 20 bp, Artificial Sequence
  Chr20q_6 Forward Primer
gcactatctcctccacgctc

SEQ ID NO: 20405 - DNA, 20 bp, Artificial Sequence
  Chr20q_6 Reverse Primer
attgtcacacagtgggggtt

SEQ ID NO: 20406 - DNA, 20 bp, Artificial Sequence
  Chr20q_6 Reverse Primer
ctctgacggtgatgaccaga

SEQ ID NO: 20407 - DNA, 20 bp, Artificial Sequence
  Chr20q_6 Reverse Primer
gtattcacacaccgctctgg

SEQ ID NO: 20408 - DNA, 20 bp, Artificial Sequence
  Chr20q_6 Reverse Primer
tcgtctgacttgacgtgacc

SEQ ID NO: 20409 - DNA, 20 bp, Artificial Sequence
  Chr20q_6 Reverse Primer
gaagccctgatacagggtga

SEQ ID NO: 20410 - DNA, 20 bp, Artificial Sequence
  Chr20q_6 Reverse Primer
gggccttgtaacatttgctg

SEQ ID NO: 20411 - DNA, 20 bp, Artificial Sequence
  Chr20q_6 Reverse Primer
ccagactgctgctgttcaag

SEQ ID NO: 20412 - DNA, 20 bp, Artificial Sequence
  Chr20q_6 Reverse Primer
tggttgctgctctgaagttg

SEQ ID NO: 20413 - DNA, 23 bp, Artificial Sequence
  Chr20q_6 Reverse Primer
ggtaccttgttcatttccttcat

SEQ ID NO: 20414 - DNA, 20 bp, Artificial Sequence
  Chr20q_6 Reverse Primer
ccagaccttaccgttttcca

SEQ ID NO: 20415 - DNA, 20 bp, Artificial Sequence
  Chr20q_6 Reverse Primer
tagaggcctttgggaagaca

SEQ ID NO: 20416 - DNA, 21 bp, Artificial Sequence
  Chr20q_6 Reverse Primer
ttcagaatgctggttgacaga

SEQ ID NO: 20417 - DNA, 20 bp, Artificial Sequence
  Chr20q_6 Reverse Primer
gagctcgcagtcactaggct

SEQ ID NO: 20418 - DNA, 20 bp, Artificial Sequence
  Chr20q_6 Reverse Primer
tctcccctctgaagacctga

SEQ ID NO: 20419 - DNA, 20 bp, Artificial Sequence
  Chr20q_6 Reverse Primer
tggataccacgtgcactcat

SEQ ID NO: 20420 - DNA, 20 bp, Artificial Sequence
  Chr20q_6 Reverse Primer
agtgtgagtgtttccagcca

SEQ ID NO: 20421 - DNA, 20 bp, Artificial Sequence
  Chr20q_6 Reverse Primer
gacttggtggcccataagag

SEQ ID NO: 20422 - DNA, 20 bp, Artificial Sequence
  Chr20q_6 Reverse Primer
gggaccctagagagaaacgg

SEQ ID NO: 20423 - DNA, 20 bp, Artificial Sequence
  Chr20q_6 Reverse Primer
atggcactctttcccacttg

SEQ ID NO: 20424 - DNA, 20 bp, Artificial Sequence
  Chr20q_6 Reverse Primer
tctacatgtgggcgtctcag

SEQ ID NO: 20425 - DNA, 20 bp, Artificial Sequence
  Chr20q_6 Reverse Primer
gagacacacaccaagggtga

SEQ ID NO: 20426 - DNA, 20 bp, Artificial Sequence
  Chr20q_6 Reverse Primer
gaggtcatggagaggcagag

SEQ ID NO: 20427 - DNA, 20 bp, Artificial Sequence
  Chr20q_6 Reverse Primer
gttttcaacgcaggaagctc

SEQ ID NO: 20428 - DNA, 20 bp, Artificial Sequence
  Chr20q_6 Reverse Primer
aatgagggctgctcttctca

SEQ ID NO: 20429 - DNA, 19 bp, Artificial Sequence
  Chr20q_6 Reverse Primer
gcacgaggcagggactact

SEQ ID NO: 20430 - DNA, 20 bp, Artificial Sequence
  Chr20q_6 Reverse Primer
aagcaagaaagagcagcgag

SEQ ID NO: 20431 - DNA, 21 bp, Artificial Sequence
  Chr20q_6 Reverse Primer
gcaacttccactgtttctgga

SEQ ID NO: 20432 - DNA, 20 bp, Artificial Sequence
  Chr20q_6 Reverse Primer
cgcaggaagcatatgacaga

SEQ ID NO: 20433 - DNA, 20 bp, Artificial Sequence
  Chr20q_6 Reverse Primer
ttccaagcctcagcatttct

SEQ ID NO: 20434 - DNA, 20 bp, Artificial Sequence
  Chr20q_6 Reverse Primer
ctgctgtcaccagaattcca

SEQ ID NO: 20435 - DNA, 20 bp, Artificial Sequence
  Chr20q_6 Reverse Primer
aagcagggagttcggatttt

SEQ ID NO: 20436 - DNA, 20 bp, Artificial Sequence
  Chr20q_6 Reverse Primer
aaatgccaggagaaaaccaa

SEQ ID NO: 20437 - DNA, 20 bp, Artificial Sequence
  Chr20q_6 Reverse Primer
catctgcctttcctctcgac

SEQ ID NO: 20438 - DNA, 20 bp, Artificial Sequence
  Chr20q_6 Reverse Primer
ccacagggaagattcttgga

SEQ ID NO: 20439 - DNA, 20 bp, Artificial Sequence
  Chr20q_6 Reverse Primer
tgagcccaagggtttagaga

SEQ ID NO: 20440 - DNA, 20 bp, Artificial Sequence
  Chr20q_6 Reverse Primer
ggtccacccacatgaaactt

SEQ ID NO: 20441 - DNA, 20 bp, Artificial Sequence
  Chr20q_6 Reverse Primer
agtcacagggcaagttggac

SEQ ID NO: 20442 - DNA, 20 bp, Artificial Sequence
  Chr20q_6 Reverse Primer
ccccaaggacaaggttgtta

SEQ ID NO: 20443 - DNA, 21 bp, Artificial Sequence
  Chr20q_6 Reverse Primer
ggtctgggtgagtctcatttg

SEQ ID NO: 20444 - DNA, 20 bp, Artificial Sequence
  Chr20q_6 Reverse Primer
ttgcctggaaaatcacaaca

SEQ ID NO: 20445 - DNA, 20 bp, Artificial Sequence
  Chr20q_6 Reverse Primer
tctcattcagagcatccgtg

SEQ ID NO: 20446 - DNA, 20 bp, Artificial Sequence
  Chr20q_6 Reverse Primer
ttctgaactcagggagggtg

SEQ ID NO: 20447 - DNA, 20 bp, Artificial Sequence
  Chr20q_6 Reverse Primer
caaccagcagccccttatta

SEQ ID NO: 20448 - DNA, 20 bp, Artificial Sequence
  Chr20q_6 Reverse Primer
ggcccttatgtcaccatcat

SEQ ID NO: 20449 - DNA, 20 bp, Artificial Sequence
  Chr20q_6 Reverse Primer
ttgaagacagcaccccctac

SEQ ID NO: 20450 - DNA, 20 bp, Artificial Sequence
  Chr20q_6 Reverse Primer
taaaccttcagtccctgcca

SEQ ID NO: 20451 - DNA, 20 bp, Artificial Sequence
  Chr20q_6 Reverse Primer
tcgtgtacattttcccagca

SEQ ID NO: 20452 - DNA, 20 bp, Artificial Sequence
  Chr20q_6 Reverse Primer
gctatgatgcctctcccaag

SEQ ID NO: 20453 - DNA, 20 bp, Artificial Sequence
  Chr20q_6 Reverse Primer
acactcatgtggaagagggg

SEQ ID NO: 20454 - DNA, 21 bp, Artificial Sequence
  Chr20q_6 Reverse Primer
agcccttatacaacctcagca

SEQ ID NO: 20455 - DNA, 20 bp, Artificial Sequence
  Chr20q_6 Reverse Primer
tgggcttcatacccactttc

SEQ ID NO: 20456 - DNA, 20 bp, Artificial Sequence
  Chr20q_6 Reverse Primer
acccacactggaagggagtt

SEQ ID NO: 20457 - DNA, 20 bp, Artificial Sequence
  Chr20q_6 Reverse Primer
cctggtcttgtgtttcagca

SEQ ID NO: 20458 - DNA, 20 bp, Artificial Sequence
  Chr20q_6 Reverse Primer
ttgtacccactgccatctca

SEQ ID NO: 20459 - DNA, 20 bp, Artificial Sequence
  Chr20q_6 Reverse Primer
agagtttgtccccacactgc

SEQ ID NO: 20460 - DNA, 20 bp, Artificial Sequence
  Chr20q_6 Reverse Primer
cataaaatcgagagagccgc

SEQ ID NO: 20461 - DNA, 20 bp, Artificial Sequence
  Chr20q_6 Reverse Primer
gtgtgtgttttccgagggtt

SEQ ID NO: 20462 - DNA, 18 bp, Artificial Sequence
  Chr20q_6 Reverse Primer
cacaaacaggctggcgtc

SEQ ID NO: 20463 - DNA, 19 bp, Artificial Sequence
  Chr20q_6 Reverse Primer
cagctgccgctttctgtag

SEQ ID NO: 20464 - DNA, 20 bp, Artificial Sequence
  Chr20q_6 Reverse Primer
cccttggtcgctgaattaga

SEQ ID NO: 20465 - DNA, 18 bp, Artificial Sequence
  Chr20q_6 Reverse Primer
gtttccgtgctgtggtcc

SEQ ID NO: 20466 - DNA, 19 bp, Artificial Sequence
  Chr20q_6 Reverse Primer
cctaggccctctttggaca

SEQ ID NO: 20467 - DNA, 19 bp, Artificial Sequence
  Chr20q_6 Reverse Primer
aatccttgcgtagcgatcc

SEQ ID NO: 20468 - DNA, 20 bp, Artificial Sequence
  Chr20q_6 Reverse Primer
ccgcccacttatattcctga

SEQ ID NO: 20469 - DNA, 20 bp, Artificial Sequence
  Chr20q_6 Reverse Primer
ttcctcatccagggctacag

SEQ ID NO: 20470 - DNA, 20 bp, Artificial Sequence
  Chr20q_6 Reverse Primer
aatttttccaggaccaccct

SEQ ID NO: 20471 - DNA, 20 bp, Artificial Sequence
  Chr20q_6 Reverse Primer
gccaaagacattctccacct

SEQ ID NO: 20472 - DNA, 23 bp, Artificial Sequence
  Chr20q_6 Reverse Primer
caaaattagcgctagaattagcc

SEQ ID NO: 20473 - DNA, 21 bp, Artificial Sequence
  Chr20q_6 Reverse Primer
aaaaagcttcccgtctcagat

SEQ ID NO: 20474 - DNA, 22 bp, Artificial Sequence
  Chr20q_6 Reverse Primer
cgaatcacctgtaagcaaagtg

SEQ ID NO: 20475 - DNA, 20 bp, Artificial Sequence
  Chr20q_6 Reverse Primer
tggtttgctacatggctttg

SEQ ID NO: 20476 - DNA, 26 bp, Artificial Sequence
  Chr20q_6 Reverse Primer
ttgcctctttttaactgttttacttt

SEQ ID NO: 20477 - DNA, 20 bp, Artificial Sequence
  Chr20q_6 Reverse Primer
tttctgcagctttttcctga

SEQ ID NO: 20478 - DNA, 20 bp, Artificial Sequence
  Chr20q_6 Reverse Primer
tggtcactgcgtatcctcct

SEQ ID NO: 20479 - DNA, 20 bp, Artificial Sequence
  Chr20q_6 Reverse Primer
gaaggaagacccgaaggaac

SEQ ID NO: 20480 - DNA, 22 bp, Artificial Sequence
  Chr20q_6 Reverse Primer
ggagtgcataaagtcaaacctg

SEQ ID NO: 20481 - DNA, 20 bp, Artificial Sequence
  Chr20q_6 Reverse Primer
gctggaaatcacctaaccca

SEQ ID NO: 20482 - DNA, 20 bp, Artificial Sequence
  Chr20q_6 Reverse Primer
ggagatcgaaggaaaccaca

SEQ ID NO: 20483 - DNA, 22 bp, Artificial Sequence
  Chr20q_6 Reverse Primer
caagcctgaataaggacctcag

SEQ ID NO: 20484 - DNA, 20 bp, Artificial Sequence
  Chr20q_6 Reverse Primer
aatgcagccaacaccagagt

SEQ ID NO: 20485 - DNA, 20 bp, Artificial Sequence
  Chr20q_6 Reverse Primer
agtaagcctcactgctccca

SEQ ID NO: 20486 - DNA, 20 bp, Artificial Sequence
  Chr20q_6 Reverse Primer
gcatgcaatcaagcaaacac

SEQ ID NO: 20487 - DNA, 20 bp, Artificial Sequence
  Chr20q_6 Reverse Primer
aatggtcagactggggacag

SEQ ID NO: 20488 - DNA, 20 bp, Artificial Sequence
  Chr20q_6 Reverse Primer
attgcaaacctcggttaaaa

SEQ ID NO: 20489 - DNA, 21 bp, Artificial Sequence
  Chr20q_6 Reverse Primer
tcctcttcattccttccacaa

SEQ ID NO: 20490 - DNA, 24 bp, Artificial Sequence
  Chr20q_6 Reverse Primer
caacatggaactctatcttctgga

SEQ ID NO: 20491 - DNA, 20 bp, Artificial Sequence
  Chr20q_6 Reverse Primer
tgagaaaccactctttcccg

SEQ ID NO: 20492 - DNA, 22 bp, Artificial Sequence
  Chr20q_6 Reverse Primer
cacattctattttccctcagga

SEQ ID NO: 20493 - DNA, 20 bp, Artificial Sequence
  Chr20q_6 Reverse Primer
gttggggaaagcacaaagaa

SEQ ID NO: 20494 - DNA, 24 bp, Artificial Sequence
  Chr20q_6 Reverse Primer
ttaaatcatcagttcacatggtgt

SEQ ID NO: 20495 - DNA, 20 bp, Artificial Sequence
  Chr20q_6 Reverse Primer
ccgtggctacagtccttctc

SEQ ID NO: 20496 - DNA, 20 bp, Artificial Sequence
  Chr20q_6 Reverse Primer
gaacaaccctcacctctcca

SEQ ID NO: 20497 - DNA, 20 bp, Artificial Sequence
  Chr20q_6 Reverse Primer
ggcttattccactgcagctc

SEQ ID NO: 20498 - DNA, 20 bp, Artificial Sequence
  Chr20q_6 Reverse Primer
gtgaggttcctgaatgggaa

SEQ ID NO: 20499 - DNA, 20 bp, Artificial Sequence
  Chr20q_6 Reverse Primer
agacagcagaccccgaagta

SEQ ID NO: 20500 - DNA, 20 bp, Artificial Sequence
  Chr20q_6 Reverse Primer
tggaatgaatgcacgaggta

SEQ ID NO: 20501 - DNA, 20 bp, Artificial Sequence
  Chr20q_7 Forward Primer
tggcggtacataatgtctgg

SEQ ID NO: 20502 - DNA, 20 bp, Artificial Sequence
  Chr20q_7 Forward Primer
acccagagaatcacccagtg

SEQ ID NO: 20503 - DNA, 20 bp, Artificial Sequence
  Chr20q_7 Forward Primer
atagggtaggagcctgtggg

SEQ ID NO: 20504 - DNA, 20 bp, Artificial Sequence
  Chr20q_7 Forward Primer
cattattacccaggagccca

SEQ ID NO: 20505 - DNA, 20 bp, Artificial Sequence
  Chr20q_7 Forward Primer
gtgaagcagttctgggctgt

SEQ ID NO: 20506 - DNA, 20 bp, Artificial Sequence
  Chr20q_7 Forward Primer
gagtgggatcaggagcagag

SEQ ID NO: 20507 - DNA, 20 bp, Artificial Sequence
  Chr20q_7 Forward Primer
ttctcctcagacttgggcat

SEQ ID NO: 20508 - DNA, 19 bp, Artificial Sequence
  Chr20q_7 Forward Primer
gcttctgggcctgatgtct

SEQ ID NO: 20509 - DNA, 20 bp, Artificial Sequence
  Chr20q_7 Forward Primer
gctgacatggtcttcctggt

SEQ ID NO: 20510 - DNA, 19 bp, Artificial Sequence
  Chr20q_7 Forward Primer
ctccacatggggtgttctg

SEQ ID NO: 20511 - DNA, 20 bp, Artificial Sequence
  Chr20q_7 Forward Primer
ctcagcaccaaggaacaggt

SEQ ID NO: 20512 - DNA, 20 bp, Artificial Sequence
  Chr20q_7 Forward Primer
tcaccttgcaggtagggtct

SEQ ID NO: 20513 - DNA, 20 bp, Artificial Sequence
  Chr20q_7 Forward Primer
caaggtggtgattctggtga

SEQ ID NO: 20514 - DNA, 20 bp, Artificial Sequence
  Chr20q_7 Forward Primer
cgtgaacttccctggtgaga

SEQ ID NO: 20515 - DNA, 18 bp, Artificial Sequence
  Chr20q_7 Forward Primer
caggtgggccgagtacag

SEQ ID NO: 20516 - DNA, 18 bp, Artificial Sequence
  Chr20q_7 Forward Primer
cctgctcagccgtctcat

SEQ ID NO: 20517 - DNA, 20 bp, Artificial Sequence
  Chr20q_7 Forward Primer
tttcctgtccctcctgtgag

SEQ ID NO: 20518 - DNA, 20 bp, Artificial Sequence
  Chr20q_7 Forward Primer
aataactgggtccaggctga

SEQ ID NO: 20519 - DNA, 20 bp, Artificial Sequence
  Chr20q_7 Forward Primer
tgtcgtaggtacagggagcc

SEQ ID NO: 20520 - DNA, 20 bp, Artificial Sequence
  Chr20q_7 Forward Primer
cttaaccacccacagttggc

SEQ ID NO: 20521 - DNA, 20 bp, Artificial Sequence
  Chr20q_7 Forward Primer
cacattcctcccatgacctc

SEQ ID NO: 20522 - DNA, 20 bp, Artificial Sequence
  Chr20q_7 Forward Primer
acgtcatgtctctgcaggtg

SEQ ID NO: 20523 - DNA, 20 bp, Artificial Sequence
  Chr20q_7 Forward Primer
gagacacctgggcttctcag

SEQ ID NO: 20524 - DNA, 20 bp, Artificial Sequence
  Chr20q_7 Forward Primer
ctcaggacaagcccattttc

SEQ ID NO: 20525 - DNA, 20 bp, Artificial Sequence
  Chr20q_7 Forward Primer
tttctgtgtccttctgccct

SEQ ID NO: 20526 - DNA, 20 bp, Artificial Sequence
  Chr20q_7 Forward Primer
aagccaaagtctagggctca

SEQ ID NO: 20527 - DNA, 19 bp, Artificial Sequence
  Chr20q_7 Forward Primer
agtgaccctgtgtccctcc

SEQ ID NO: 20528 - DNA, 20 bp, Artificial Sequence
  Chr20q_7 Forward Primer
acaaaccacctagtgtcccg

SEQ ID NO: 20529 - DNA, 20 bp, Artificial Sequence
  Chr20q_7 Forward Primer
ccgagaaatccgtgagtctt

SEQ ID NO: 20530 - DNA, 20 bp, Artificial Sequence
  Chr20q_7 Forward Primer
aagaccccagacccaggtag

SEQ ID NO: 20531 - DNA, 20 bp, Artificial Sequence
  Chr20q_7 Forward Primer
ttcctggagaaccacaggtc

SEQ ID NO: 20532 - DNA, 19 bp, Artificial Sequence
  Chr20q_7 Forward Primer
atggagcaaacccaagtcc

SEQ ID NO: 20533 - DNA, 20 bp, Artificial Sequence
  Chr20q_7 Forward Primer
cgaagggtatcacacccagt

SEQ ID NO: 20534 - DNA, 20 bp, Artificial Sequence
  Chr20q_7 Forward Primer
ctcccactcacactgaccct

SEQ ID NO: 20535 - DNA, 20 bp, Artificial Sequence
  Chr20q_7 Forward Primer
tatgtaaggtcagggccagg

SEQ ID NO: 20536 - DNA, 20 bp, Artificial Sequence
  Chr20q_7 Forward Primer
taagctgcagtgtgaatggg

SEQ ID NO: 20537 - DNA, 18 bp, Artificial Sequence
  Chr20q_7 Forward Primer
gtgggagttggggctcat

SEQ ID NO: 20538 - DNA, 19 bp, Artificial Sequence
  Chr20q_7 Forward Primer
ctgggtccctcttgagtcc

SEQ ID NO: 20539 - DNA, 20 bp, Artificial Sequence
  Chr20q_7 Forward Primer
atctccatgggcagagtgag

SEQ ID NO: 20540 - DNA, 20 bp, Artificial Sequence
  Chr20q_7 Forward Primer
tgttggggcttaggaatgtc

SEQ ID NO: 20541 - DNA, 19 bp, Artificial Sequence
  Chr20q_7 Forward Primer
ctctcctcttcctcggtgg

SEQ ID NO: 20542 - DNA, 19 bp, Artificial Sequence
  Chr20q_7 Forward Primer
ggcagatggttctccaggt

SEQ ID NO: 20543 - DNA, 20 bp, Artificial Sequence
  Chr20q_7 Forward Primer
agagcagagctgcctttcag

SEQ ID NO: 20544 - DNA, 20 bp, Artificial Sequence
  Chr20q_7 Forward Primer
cagtctacagctgggaaggg

SEQ ID NO: 20545 - DNA, 20 bp, Artificial Sequence
  Chr20q_7 Forward Primer
acattgagggtcacctccag

SEQ ID NO: 20546 - DNA, 20 bp, Artificial Sequence
  Chr20q_7 Forward Primer
cttccttgggagggaacatt

SEQ ID NO: 20547 - DNA, 20 bp, Artificial Sequence
  Chr20q_7 Forward Primer
gttgcagtttcagctccaga

SEQ ID NO: 20548 - DNA, 20 bp, Artificial Sequence
  Chr20q_7 Forward Primer
agagagcccctctcatcctc

SEQ ID NO: 20549 - DNA, 19 bp, Artificial Sequence
  Chr20q_7 Forward Primer
ggtctggaagtctccctgg

SEQ ID NO: 20550 - DNA, 20 bp, Artificial Sequence
  Chr20q_7 Forward Primer
cactggccaatgtattgctg

SEQ ID NO: 20551 - DNA, 20 bp, Artificial Sequence
  Chr20q_7 Forward Primer
actgggatccagaactgtgc

SEQ ID NO: 20552 - DNA, 20 bp, Artificial Sequence
  Chr20q_7 Forward Primer
cagccttgtctactcagggg

SEQ ID NO: 20553 - DNA, 20 bp, Artificial Sequence
  Chr20q_7 Forward Primer
aagagaacacccctcccagt

SEQ ID NO: 20554 - DNA, 20 bp, Artificial Sequence
  Chr20q_7 Forward Primer
ctgtcctattggccctgaag

SEQ ID NO: 20555 - DNA, 20 bp, Artificial Sequence
  Chr20q_7 Forward Primer
cctaaaccacggtactgcac

SEQ ID NO: 20556 - DNA, 20 bp, Artificial Sequence
  Chr20q_7 Forward Primer
gagcacatctcaggcacaga

SEQ ID NO: 20557 - DNA, 20 bp, Artificial Sequence
  Chr20q_7 Forward Primer
cagccctgtgtctgtgatgt

SEQ ID NO: 20558 - DNA, 20 bp, Artificial Sequence
  Chr20q_7 Forward Primer
ctcccaggtggattcgtcta

SEQ ID NO: 20559 - DNA, 20 bp, Artificial Sequence
  Chr20q_7 Forward Primer
agatgggctggtcctctttt

SEQ ID NO: 20560 - DNA, 20 bp, Artificial Sequence
  Chr20q_7 Forward Primer
acagtgtggggatggtctct

SEQ ID NO: 20561 - DNA, 20 bp, Artificial Sequence
  Chr20q_7 Forward Primer
cttcaccttcggcttttcag

SEQ ID NO: 20562 - DNA, 20 bp, Artificial Sequence
  Chr20q_7 Forward Primer
gtggtcgctgaattctcgtt

SEQ ID NO: 20563 - DNA, 20 bp, Artificial Sequence
  Chr20q_7 Forward Primer
accccgttagaacccagagt

SEQ ID NO: 20564 - DNA, 20 bp, Artificial Sequence
  Chr20q_7 Forward Primer
ggcctgtggtaggtgtcact

SEQ ID NO: 20565 - DNA, 18 bp, Artificial Sequence
  Chr20q_7 Forward Primer
gggcttggagggttctgt

SEQ ID NO: 20566 - DNA, 20 bp, Artificial Sequence
  Chr20q_7 Forward Primer
gcttgggttacagggtgtgt

SEQ ID NO: 20567 - DNA, 20 bp, Artificial Sequence
  Chr20q_7 Forward Primer
gcctcacttctgctggaact

SEQ ID NO: 20568 - DNA, 18 bp, Artificial Sequence
  Chr20q_7 Forward Primer
gcacagctggggacgttt

SEQ ID NO: 20569 - DNA, 20 bp, Artificial Sequence
  Chr20q_7 Forward Primer
ctgttgactgccagggactt

SEQ ID NO: 20570 - DNA, 20 bp, Artificial Sequence
  Chr20q_7 Forward Primer
tagctaagggctggttctgc

SEQ ID NO: 20571 - DNA, 20 bp, Artificial Sequence
  Chr20q_7 Forward Primer
tacagccagaggcaagtcct

SEQ ID NO: 20572 - DNA, 20 bp, Artificial Sequence
  Chr20q_7 Forward Primer
ggctgagatctttggctcac

SEQ ID NO: 20573 - DNA, 20 bp, Artificial Sequence
  Chr20q_7 Forward Primer
atcttggagcagaagctgga

SEQ ID NO: 20574 - DNA, 20 bp, Artificial Sequence
  Chr20q_7 Forward Primer
ctacctcccatccttcctcc

SEQ ID NO: 20575 - DNA, 20 bp, Artificial Sequence
  Chr20q_7 Forward Primer
ctggcagatgaggggtacat

SEQ ID NO: 20576 - DNA, 19 bp, Artificial Sequence
  Chr20q_7 Forward Primer
gcctctgggagtgacaggt

SEQ ID NO: 20577 - DNA, 20 bp, Artificial Sequence
  Chr20q_7 Forward Primer
agggagagtggagctcaggt

SEQ ID NO: 20578 - DNA, 20 bp, Artificial Sequence
  Chr20q_7 Forward Primer
tggtgggtacagcacaactc

SEQ ID NO: 20579 - DNA, 20 bp, Artificial Sequence
  Chr20q_7 Forward Primer
ccacagacccgtcagagaat

SEQ ID NO: 20580 - DNA, 20 bp, Artificial Sequence
  Chr20q_7 Forward Primer
cttcctccctgggtttgtct

SEQ ID NO: 20581 - DNA, 20 bp, Artificial Sequence
  Chr20q_7 Forward Primer
tctctgggcctcatctaagc

SEQ ID NO: 20582 - DNA, 20 bp, Artificial Sequence
  Chr20q_7 Forward Primer
cattgctttgagacttggca

SEQ ID NO: 20583 - DNA, 20 bp, Artificial Sequence
  Chr20q_7 Forward Primer
gggaagccatatcattgagg

SEQ ID NO: 20584 - DNA, 20 bp, Artificial Sequence
  Chr20q_7 Forward Primer
gtcagcaggatgggagagag

SEQ ID NO: 20585 - DNA, 20 bp, Artificial Sequence
  Chr20q_7 Forward Primer
gaccagcaaaacagcttggt

SEQ ID NO: 20586 - DNA, 20 bp, Artificial Sequence
  Chr20q_7 Forward Primer
gctgtcttcgggaaactgac

SEQ ID NO: 20587 - DNA, 20 bp, Artificial Sequence
  Chr20q_7 Forward Primer
tccctctgggtccttttagg

SEQ ID NO: 20588 - DNA, 20 bp, Artificial Sequence
  Chr20q_7 Forward Primer
agagctcatggccttaggtg

SEQ ID NO: 20589 - DNA, 20 bp, Artificial Sequence
  Chr20q_7 Forward Primer
gggaggaatgtgtagcagga

SEQ ID NO: 20590 - DNA, 20 bp, Artificial Sequence
  Chr20q_7 Forward Primer
attcagtgcatttcttgggg

SEQ ID NO: 20591 - DNA, 21 bp, Artificial Sequence
  Chr20q_7 Forward Primer
tgaaactggaaaaacaaccaa

SEQ ID NO: 20592 - DNA, 20 bp, Artificial Sequence
  Chr20q_7 Forward Primer
agtcctctgggtgaagagca

SEQ ID NO: 20593 - DNA, 19 bp, Artificial Sequence
  Chr20q_7 Forward Primer
aggcctctttccctcacct

SEQ ID NO: 20594 - DNA, 20 bp, Artificial Sequence
  Chr20q_7 Forward Primer
aaccttttctggctccttcc

SEQ ID NO: 20595 - DNA, 20 bp, Artificial Sequence
  Chr20q_7 Forward Primer
ctccccaaatccgtacacac

SEQ ID NO: 20596 - DNA, 20 bp, Artificial Sequence
  Chr20q_7 Forward Primer
tatcggtaacatgacgccag

SEQ ID NO: 20597 - DNA, 20 bp, Artificial Sequence
  Chr20q_7 Reverse Primer
taaggtcctagcgttgcctg

SEQ ID NO: 20598 - DNA, 20 bp, Artificial Sequence
  Chr20q_7 Reverse Primer
gccgcaagtattttctgctg

SEQ ID NO: 20599 - DNA, 20 bp, Artificial Sequence
  Chr20q_7 Reverse Primer
ggcggtgaaaagaagatgtc

SEQ ID NO: 20600 - DNA, 20 bp, Artificial Sequence
  Chr20q_7 Reverse Primer
ttaggggtcttggtggtcag

SEQ ID NO: 20601 - DNA, 20 bp, Artificial Sequence
  Chr20q_7 Reverse Primer
ctcaactgcagggagacaca

SEQ ID NO: 20602 - DNA, 20 bp, Artificial Sequence
  Chr20q_7 Reverse Primer
gatggaggagacaaagccag

SEQ ID NO: 20603 - DNA, 18 bp, Artificial Sequence
  Chr20q_7 Reverse Primer
gggagatgcctgaacgag

SEQ ID NO: 20604 - DNA, 20 bp, Artificial Sequence
  Chr20q_7 Reverse Primer
ctccagccacaagagtgagg

SEQ ID NO: 20605 - DNA, 20 bp, Artificial Sequence
  Chr20q_7 Reverse Primer
acaggtcacagcctcctctg

SEQ ID NO: 20606 - DNA, 20 bp, Artificial Sequence
  Chr20q_7 Reverse Primer
catccccgctgtactgagtc

SEQ ID NO: 20607 - DNA, 20 bp, Artificial Sequence
  Chr20q_7 Reverse Primer
ggggtgactctgccctctat

SEQ ID NO: 20608 - DNA, 20 bp, Artificial Sequence
  Chr20q_7 Reverse Primer
cttgggagcagcaggaataa

SEQ ID NO: 20609 - DNA, 18 bp, Artificial Sequence
  Chr20q_7 Reverse Primer
cagatgtggaagctgggg

SEQ ID NO: 20610 - DNA, 20 bp, Artificial Sequence
  Chr20q_7 Reverse Primer
aaggaagggtctgtgctcct

SEQ ID NO: 20611 - DNA, 19 bp, Artificial Sequence
  Chr20q_7 Reverse Primer
acgctgtggacggtgatgt

SEQ ID NO: 20612 - DNA, 20 bp, Artificial Sequence
  Chr20q_7 Reverse Primer
acagatgtaagggggtgctg

SEQ ID NO: 20613 - DNA, 20 bp, Artificial Sequence
  Chr20q_7 Reverse Primer
tcagatacttgagggggtgc

SEQ ID NO: 20614 - DNA, 20 bp, Artificial Sequence
  Chr20q_7 Reverse Primer
gcccaccacaattatccatc

SEQ ID NO: 20615 - DNA, 20 bp, Artificial Sequence
  Chr20q_7 Reverse Primer
agaccaggtactctgtgcgg

SEQ ID NO: 20616 - DNA, 20 bp, Artificial Sequence
  Chr20q_7 Reverse Primer
caagaacccagcgagctaag

SEQ ID NO: 20617 - DNA, 20 bp, Artificial Sequence
  Chr20q_7 Reverse Primer
gagcccacacagagatcaca

SEQ ID NO: 20618 - DNA, 20 bp, Artificial Sequence
  Chr20q_7 Reverse Primer
aaggctgaggaacaagatgg

SEQ ID NO: 20619 - DNA, 21 bp, Artificial Sequence
  Chr20q_7 Reverse Primer
ttatctgatggttggctccac

SEQ ID NO: 20620 - DNA, 20 bp, Artificial Sequence
  Chr20q_7 Reverse Primer
cacggacagtgtaggtggtg

SEQ ID NO: 20621 - DNA, 20 bp, Artificial Sequence
  Chr20q_7 Reverse Primer
tgggagctttctctgaagga

SEQ ID NO: 20622 - DNA, 20 bp, Artificial Sequence
  Chr20q_7 Reverse Primer
agtaggccaagatggtgacg

SEQ ID NO: 20623 - DNA, 20 bp, Artificial Sequence
  Chr20q_7 Reverse Primer
cgtgtgagctcaaggaagtg

SEQ ID NO: 20624 - DNA, 20 bp, Artificial Sequence
  Chr20q_7 Reverse Primer
cctaccctgctctgcgtaat

SEQ ID NO: 20625 - DNA, 20 bp, Artificial Sequence
  Chr20q_7 Reverse Primer
gctcctggcacagagaccta

SEQ ID NO: 20626 - DNA, 20 bp, Artificial Sequence
  Chr20q_7 Reverse Primer
caagtgtgaccacgtccttg

SEQ ID NO: 20627 - DNA, 20 bp, Artificial Sequence
  Chr20q_7 Reverse Primer
agaaggcaggaaggagcact

SEQ ID NO: 20628 - DNA, 19 bp, Artificial Sequence
  Chr20q_7 Reverse Primer
ctggtgtgaggagaggctg

SEQ ID NO: 20629 - DNA, 20 bp, Artificial Sequence
  Chr20q_7 Reverse Primer
cagcctgtgctccatctgta

SEQ ID NO: 20630 - DNA, 19 bp, Artificial Sequence
  Chr20q_7 Reverse Primer
gacgtctgtggaggcacaa

SEQ ID NO: 20631 - DNA, 20 bp, Artificial Sequence
  Chr20q_7 Reverse Primer
ggcctgtttcaagtaggcag

SEQ ID NO: 20632 - DNA, 20 bp, Artificial Sequence
  Chr20q_7 Reverse Primer
tcagtgagttcccctttgct

SEQ ID NO: 20633 - DNA, 18 bp, Artificial Sequence
  Chr20q_7 Reverse Primer
gggtgggaagtcagcaca

SEQ ID NO: 20634 - DNA, 20 bp, Artificial Sequence
  Chr20q_7 Reverse Primer
ccttgaagagcgtgaaggtc

SEQ ID NO: 20635 - DNA, 20 bp, Artificial Sequence
  Chr20q_7 Reverse Primer
gggagggtggtcatgagata

SEQ ID NO: 20636 - DNA, 20 bp, Artificial Sequence
  Chr20q_7 Reverse Primer
accctgaagagaaactgcca

SEQ ID NO: 20637 - DNA, 20 bp, Artificial Sequence
  Chr20q_7 Reverse Primer
ccctcatttgagaacaggga

SEQ ID NO: 20638 - DNA, 20 bp, Artificial Sequence
  Chr20q_7 Reverse Primer
atggccgtagcctcctatct

SEQ ID NO: 20639 - DNA, 20 bp, Artificial Sequence
  Chr20q_7 Reverse Primer
gacagaatccctcccattga

SEQ ID NO: 20640 - DNA, 20 bp, Artificial Sequence
  Chr20q_7 Reverse Primer
ggaagacgatggtgtgctct

SEQ ID NO: 20641 - DNA, 20 bp, Artificial Sequence
  Chr20q_7 Reverse Primer
aatcttcctcacttcctgcg

SEQ ID NO: 20642 - DNA, 20 bp, Artificial Sequence
  Chr20q_7 Reverse Primer
cctgacctcacctcaggttt

SEQ ID NO: 20643 - DNA, 20 bp, Artificial Sequence
  Chr20q_7 Reverse Primer
aagccttccctgatctctcc

SEQ ID NO: 20644 - DNA, 20 bp, Artificial Sequence
  Chr20q_7 Reverse Primer
aagtgcatagtgggcaggtc

SEQ ID NO: 20645 - DNA, 19 bp, Artificial Sequence
  Chr20q_7 Reverse Primer
gacgccactggactcactg

SEQ ID NO: 20646 - DNA, 20 bp, Artificial Sequence
  Chr20q_7 Reverse Primer
cactagaggagggttcgcag

SEQ ID NO: 20647 - DNA, 19 bp, Artificial Sequence
  Chr20q_7 Reverse Primer
ggtccaaggacctctcagg

SEQ ID NO: 20648 - DNA, 20 bp, Artificial Sequence
  Chr20q_7 Reverse Primer
ccaaccaaggtagaggagca

SEQ ID NO: 20649 - DNA, 20 bp, Artificial Sequence
  Chr20q_7 Reverse Primer
catcctccctatctgggtga

SEQ ID NO: 20650 - DNA, 20 bp, Artificial Sequence
  Chr20q_7 Reverse Primer
cgctgtcttcaacatccctc

SEQ ID NO: 20651 - DNA, 20 bp, Artificial Sequence
  Chr20q_7 Reverse Primer
aaccgcagacaaagggaata

SEQ ID NO: 20652 - DNA, 20 bp, Artificial Sequence
  Chr20q_7 Reverse Primer
gctgcttggaagagaaatgc

SEQ ID NO: 20653 - DNA, 20 bp, Artificial Sequence
  Chr20q_7 Reverse Primer
gaggaggcgcgatttctact

SEQ ID NO: 20654 - DNA, 20 bp, Artificial Sequence
  Chr20q_7 Reverse Primer
gagcatctgaaaaaccccaa

SEQ ID NO: 20655 - DNA, 20 bp, Artificial Sequence
  Chr20q_7 Reverse Primer
ggatggctgtgtttttggat

SEQ ID NO: 20656 - DNA, 21 bp, Artificial Sequence
  Chr20q_7 Reverse Primer
cctggaaaatccaagaaaacc

SEQ ID NO: 20657 - DNA, 20 bp, Artificial Sequence
  Chr20q_7 Reverse Primer
ccacatgacaaaatgcacct

SEQ ID NO: 20658 - DNA, 20 bp, Artificial Sequence
  Chr20q_7 Reverse Primer
ttatgggaaatccaaccctg

SEQ ID NO: 20659 - DNA, 20 bp, Artificial Sequence
  Chr20q_7 Reverse Primer
attcagacccagaccgacat

SEQ ID NO: 20660 - DNA, 20 bp, Artificial Sequence
  Chr20q_7 Reverse Primer
atctccatccctgtccttcc

SEQ ID NO: 20661 - DNA, 20 bp, Artificial Sequence
  Chr20q_7 Reverse Primer
ctgcctcagtgacagctcct

SEQ ID NO: 20662 - DNA, 19 bp, Artificial Sequence
  Chr20q_7 Reverse Primer
cctggaacacaggaaccct

SEQ ID NO: 20663 - DNA, 20 bp, Artificial Sequence
  Chr20q_7 Reverse Primer
aagttgggcttcccctaaag

SEQ ID NO: 20664 - DNA, 20 bp, Artificial Sequence
  Chr20q_7 Reverse Primer
aaatctgctcccacttcagc

SEQ ID NO: 20665 - DNA, 20 bp, Artificial Sequence
  Chr20q_7 Reverse Primer
aacaggcctccaacaacaaa

SEQ ID NO: 20666 - DNA, 20 bp, Artificial Sequence
  Chr20q_7 Reverse Primer
gtcttcttccacctccccag

SEQ ID NO: 20667 - DNA, 20 bp, Artificial Sequence
  Chr20q_7 Reverse Primer
aagtgtgagatggccctgag

SEQ ID NO: 20668 - DNA, 20 bp, Artificial Sequence
  Chr20q_7 Reverse Primer
gccagtgtgaggacagacag

SEQ ID NO: 20669 - DNA, 20 bp, Artificial Sequence
  Chr20q_7 Reverse Primer
tgctgacacagattgaagcc

SEQ ID NO: 20670 - DNA, 20 bp, Artificial Sequence
  Chr20q_7 Reverse Primer
cagcctctcctccatctcag

SEQ ID NO: 20671 - DNA, 20 bp, Artificial Sequence
  Chr20q_7 Reverse Primer
ctgagatctaggggcagcag

SEQ ID NO: 20672 - DNA, 20 bp, Artificial Sequence
  Chr20q_7 Reverse Primer
cacattcctgttgcccctac

SEQ ID NO: 20673 - DNA, 20 bp, Artificial Sequence
  Chr20q_7 Reverse Primer
cagcccctcagctaagtttg

SEQ ID NO: 20674 - DNA, 20 bp, Artificial Sequence
  Chr20q_7 Reverse Primer
ctgacctgattcttgggcat

SEQ ID NO: 20675 - DNA, 20 bp, Artificial Sequence
  Chr20q_7 Reverse Primer
ggaggacagatgtgagaggc

SEQ ID NO: 20676 - DNA, 20 bp, Artificial Sequence
  Chr20q_7 Reverse Primer
gggacactctcccaggaaat

SEQ ID NO: 20677 - DNA, 19 bp, Artificial Sequence
  Chr20q_7 Reverse Primer
ggacagaggggacgatgag

SEQ ID NO: 20678 - DNA, 20 bp, Artificial Sequence
  Chr20q_7 Reverse Primer
gaagcccaggtgtgtgttct

SEQ ID NO: 20679 - DNA, 20 bp, Artificial Sequence
  Chr20q_7 Reverse Primer
ctccaggtctggtcagttcc

SEQ ID NO: 20680 - DNA, 20 bp, Artificial Sequence
  Chr20q_7 Reverse Primer
gctctccttgtccctcagtg

SEQ ID NO: 20681 - DNA, 20 bp, Artificial Sequence
  Chr20q_7 Reverse Primer
ttcatcaaattggagagccc

SEQ ID NO: 20682 - DNA, 19 bp, Artificial Sequence
  Chr20q_7 Reverse Primer
cttcctgcaaacaggagcc

SEQ ID NO: 20683 - DNA, 18 bp, Artificial Sequence
  Chr20q_7 Reverse Primer
ctccctgcatttcctccc

SEQ ID NO: 20684 - DNA, 20 bp, Artificial Sequence
  Chr20q_7 Reverse Primer
ccttacagtccacacagcca

SEQ ID NO: 20685 - DNA, 20 bp, Artificial Sequence
  Chr20q_7 Reverse Primer
ccctggtccttggtagatga

SEQ ID NO: 20686 - DNA, 20 bp, Artificial Sequence
  Chr20q_7 Reverse Primer
gaacagcaggatcctttgga

SEQ ID NO: 20687 - DNA, 23 bp, Artificial Sequence
  Chr20q_7 Reverse Primer
cagctataaattgccctctaggt

SEQ ID NO: 20688 - DNA, 20 bp, Artificial Sequence
  Chr20q_7 Reverse Primer
acactgcgagagccactctt

SEQ ID NO: 20689 - DNA, 20 bp, Artificial Sequence
  Chr20q_7 Reverse Primer
aggacacctttggaatgtgc

SEQ ID NO: 20690 - DNA, 20 bp, Artificial Sequence
  Chr20q_7 Reverse Primer
cagagggctctggttttcag

SEQ ID NO: 20691 - DNA, 21 bp, Artificial Sequence
  Chr20q_7 Reverse Primer
catgaattcttctctgcctgg

SEQ ID NO: 20692 - DNA, 20 bp, Artificial Sequence
  Chr20q_7 Reverse Primer
ttctttcctcgtagagcccc

SEQ ID NO: 20693 - DNA, 20 bp, Artificial Sequence
  Chr21_1 Forward Primer
cccaattgcttcctgtttgt

SEQ ID NO: 20694 - DNA, 22 bp, Artificial Sequence
  Chr21_1 Forward Primer
tgtaggctaaatcctaatgggg

SEQ ID NO: 20695 - DNA, 20 bp, Artificial Sequence
  Chr21_1 Forward Primer
tctcatgaagcctgtgtgct

SEQ ID NO: 20696 - DNA, 20 bp, Artificial Sequence
  Chr21_1 Forward Primer
aaggaaagctgcctctcaca

SEQ ID NO: 20697 - DNA, 20 bp, Artificial Sequence
  Chr21_1 Forward Primer
gtctgtctgccaagtcctcc

SEQ ID NO: 20698 - DNA, 21 bp, Artificial Sequence
  Chr21_1 Forward Primer
ttcccattcagtcatctcaaa

SEQ ID NO: 20699 - DNA, 21 bp, Artificial Sequence
  Chr21_1 Forward Primer
tcagacaaaaacttgcgcttt

SEQ ID NO: 20700 - DNA, 20 bp, Artificial Sequence
  Chr21_1 Forward Primer
tgcaaaacacttttccagca

SEQ ID NO: 20701 - DNA, 22 bp, Artificial Sequence
  Chr21_1 Forward Primer
tttgaggttttgatgtgtgctc

SEQ ID NO: 20702 - DNA, 20 bp, Artificial Sequence
  Chr21_1 Forward Primer
aagaaacgcagatgaggagg

SEQ ID NO: 20703 - DNA, 21 bp, Artificial Sequence
  Chr21_1 Forward Primer
aagcagaactttgccactgaa

SEQ ID NO: 20704 - DNA, 20 bp, Artificial Sequence
  Chr21_1 Forward Primer
actccttccagggccaatag

SEQ ID NO: 20705 - DNA, 20 bp, Artificial Sequence
  Chr21_1 Forward Primer
gaagcaacagcagagggaac

SEQ ID NO: 20706 - DNA, 21 bp, Artificial Sequence
  Chr21_1 Forward Primer
tcccttcctaaattcttccca

SEQ ID NO: 20707 - DNA, 20 bp, Artificial Sequence
  Chr21_1 Forward Primer
atagcgggacaatcatggta

SEQ ID NO: 20708 - DNA, 22 bp, Artificial Sequence
  Chr21_1 Forward Primer
ggagtttgtgatctggttaggg

SEQ ID NO: 20709 - DNA, 20 bp, Artificial Sequence
  Chr21_1 Forward Primer
cagaccccatttctgctgtt

SEQ ID NO: 20710 - DNA, 20 bp, Artificial Sequence
  Chr21_1 Forward Primer
ctgagacccttctgtcccaa

SEQ ID NO: 20711 - DNA, 20 bp, Artificial Sequence
  Chr21_1 Forward Primer
tgattgaagcccaatgtctt

SEQ ID NO: 20712 - DNA, 24 bp, Artificial Sequence
  Chr21_1 Forward Primer
tcctcatggaaaactaaaatatgg

SEQ ID NO: 20713 - DNA, 21 bp, Artificial Sequence
  Chr21_1 Forward Primer
gcaaggaaggagatatccaca

SEQ ID NO: 20714 - DNA, 20 bp, Artificial Sequence
  Chr21_1 Forward Primer
tcctgtgtggaaggcaattt

SEQ ID NO: 20715 - DNA, 20 bp, Artificial Sequence
  Chr21_1 Forward Primer
ccacaacgcagaatgtgaac

SEQ ID NO: 20716 - DNA, 21 bp, Artificial Sequence
  Chr21_1 Forward Primer
ccttgtacccagaaaatgcag

SEQ ID NO: 20717 - DNA, 24 bp, Artificial Sequence
  Chr21_1 Forward Primer
tggaaaaggtgttctaaaagaatc

SEQ ID NO: 20718 - DNA, 20 bp, Artificial Sequence
  Chr21_1 Forward Primer
gatgcatgcaaactgcacat

SEQ ID NO: 20719 - DNA, 22 bp, Artificial Sequence
  Chr21_1 Forward Primer
gcttacataatggtgagagggg

SEQ ID NO: 20720 - DNA, 23 bp, Artificial Sequence
  Chr21_1 Forward Primer
gaccaaaaatttcctctcacaga

SEQ ID NO: 20721 - DNA, 20 bp, Artificial Sequence
  Chr21_1 Forward Primer
tgcagaatttcccttgaggt

SEQ ID NO: 20722 - DNA, 20 bp, Artificial Sequence
  Chr21_1 Forward Primer
aaaaatagtgggggaggggt

SEQ ID NO: 20723 - DNA, 21 bp, Artificial Sequence
  Chr21_1 Forward Primer
gaatgtctgacgtagaggcca

SEQ ID NO: 20724 - DNA, 21 bp, Artificial Sequence
  Chr21_1 Forward Primer
tcacgtttacaaaatgggctt

SEQ ID NO: 20725 - DNA, 20 bp, Artificial Sequence
  Chr21_1 Forward Primer
ggcaccaaagcaaataaaaa

SEQ ID NO: 20726 - DNA, 20 bp, Artificial Sequence
  Chr21_1 Forward Primer
gatggcggtaccaggataga

SEQ ID NO: 20727 - DNA, 20 bp, Artificial Sequence
  Chr21_1 Forward Primer
agcttgaagcaaccaagaga

SEQ ID NO: 20728 - DNA, 20 bp, Artificial Sequence
  Chr21_1 Forward Primer
caaagacggaatgttgctca

SEQ ID NO: 20729 - DNA, 20 bp, Artificial Sequence
  Chr21_1 Forward Primer
gtcattcatgctccaggtga

SEQ ID NO: 20730 - DNA, 20 bp, Artificial Sequence
  Chr21_1 Forward Primer
gggaacagcccaaatgacta

SEQ ID NO: 20731 - DNA, 21 bp, Artificial Sequence
  Chr21_1 Forward Primer
ttcagggggaaagaacctaga

SEQ ID NO: 20732 - DNA, 20 bp, Artificial Sequence
  Chr21_1 Forward Primer
gccaacagtgtacctgcaaa

SEQ ID NO: 20733 - DNA, 20 bp, Artificial Sequence
  Chr21_1 Forward Primer
gatcttcccgaacagtgagc

SEQ ID NO: 20734 - DNA, 20 bp, Artificial Sequence
  Chr21_1 Forward Primer
cacaacttctgccaaaagga

SEQ ID NO: 20735 - DNA, 21 bp, Artificial Sequence
  Chr21_1 Forward Primer
agtaccatacaatggctcgtg

SEQ ID NO: 20736 - DNA, 20 bp, Artificial Sequence
  Chr21_1 Forward Primer
ctccacaggctttgagatcc

SEQ ID NO: 20737 - DNA, 20 bp, Artificial Sequence
  Chr21_1 Forward Primer
gtggagctggaaccatcatt

SEQ ID NO: 20738 - DNA, 20 bp, Artificial Sequence
  Chr21_1 Forward Primer
ggcagttcaaggagcaattc

SEQ ID NO: 20739 - DNA, 22 bp, Artificial Sequence
  Chr21_1 Forward Primer
tctgccagatagtggttcttga

SEQ ID NO: 20740 - DNA, 21 bp, Artificial Sequence
  Chr21_1 Forward Primer
aattgccttcatgttcctcaa

SEQ ID NO: 20741 - DNA, 20 bp, Artificial Sequence
  Chr21_1 Forward Primer
ccattgtgtgccctcttagg

SEQ ID NO: 20742 - DNA, 21 bp, Artificial Sequence
  Chr21_1 Forward Primer
gcttggagtcaaagatgatgc

SEQ ID NO: 20743 - DNA, 23 bp, Artificial Sequence
  Chr21_1 Forward Primer
caaagatccaaaagtccagaaaa

SEQ ID NO: 20744 - DNA, 20 bp, Artificial Sequence
  Chr21_1 Forward Primer
tgagttccacatttgcctca

SEQ ID NO: 20745 - DNA, 20 bp, Artificial Sequence
  Chr21_1 Forward Primer
tttgcacaggctgagacatc

SEQ ID NO: 20746 - DNA, 21 bp, Artificial Sequence
  Chr21_1 Forward Primer
tcagcaatgtagcatccacag

SEQ ID NO: 20747 - DNA, 20 bp, Artificial Sequence
  Chr21_1 Forward Primer
aatcagagattgggcaccac

SEQ ID NO: 20748 - DNA, 20 bp, Artificial Sequence
  Chr21_1 Forward Primer
atggcttcacttgcagaagg

SEQ ID NO: 20749 - DNA, 24 bp, Artificial Sequence
  Chr21_1 Forward Primer
cgcaaatagtaataacaatgcctg

SEQ ID NO: 20750 - DNA, 20 bp, Artificial Sequence
  Chr21_1 Forward Primer
ccttgataccaaatggtggg

SEQ ID NO: 20751 - DNA, 20 bp, Artificial Sequence
  Chr21_1 Forward Primer
cagccagcaccaacatctaa

SEQ ID NO: 20752 - DNA, 27 bp, Artificial Sequence
  Chr21_1 Forward Primer
tttgcaactaatatatggtgttatgtc

SEQ ID NO: 20753 - DNA, 20 bp, Artificial Sequence
  Chr21_1 Forward Primer
tgcctgtgcactctgaactt

SEQ ID NO: 20754 - DNA, 20 bp, Artificial Sequence
  Chr21_1 Forward Primer
gtggccaagagaacagcttc

SEQ ID NO: 20755 - DNA, 21 bp, Artificial Sequence
  Chr21_1 Forward Primer
cagtccagtttctttgcttcg

SEQ ID NO: 20756 - DNA, 22 bp, Artificial Sequence
  Chr21_1 Forward Primer
ccccaaagtgtcctttgtattc

SEQ ID NO: 20757 - DNA, 20 bp, Artificial Sequence
  Chr21_1 Forward Primer
tgccaaaataggcaaacaca

SEQ ID NO: 20758 - DNA, 21 bp, Artificial Sequence
  Chr21_1 Forward Primer
gaagggaagaacatttctggg

SEQ ID NO: 20759 - DNA, 23 bp, Artificial Sequence
  Chr21_1 Forward Primer
cgtccattatattctaggcacca

SEQ ID NO: 20760 - DNA, 20 bp, Artificial Sequence
  Chr21_1 Forward Primer
tgtagatcatgccttgctgg

SEQ ID NO: 20761 - DNA, 20 bp, Artificial Sequence
  Chr21_1 Forward Primer
tccccttacacctccctctt

SEQ ID NO: 20762 - DNA, 20 bp, Artificial Sequence
  Chr21_1 Forward Primer
caagtgcccttcacaaatca

SEQ ID NO: 20763 - DNA, 20 bp, Artificial Sequence
  Chr21_1 Forward Primer
cacaattttggccctatgct

SEQ ID NO: 20764 - DNA, 21 bp, Artificial Sequence
  Chr21_1 Forward Primer
tctgttcctgccttatctcca

SEQ ID NO: 20765 - DNA, 25 bp, Artificial Sequence
  Chr21_1 Forward Primer
tgattgagaaattcttgaatgattg

SEQ ID NO: 20766 - DNA, 23 bp, Artificial Sequence
  Chr21_1 Forward Primer
tgcttcatgtacaatcaacaagc

SEQ ID NO: 20767 - DNA, 27 bp, Artificial Sequence
  Chr21_1 Forward Primer
ttaaagaattgtaaaactttttgaacc

SEQ ID NO: 20768 - DNA, 21 bp, Artificial Sequence
  Chr21_1 Forward Primer
caaagcaatgctctcaaagtg

SEQ ID NO: 20769 - DNA, 24 bp, Artificial Sequence
  Chr21_1 Forward Primer
cttagccaatgcaataagaggttt

SEQ ID NO: 20770 - DNA, 22 bp, Artificial Sequence
  Chr21_1 Forward Primer
tgcaaaaatgaggtaacactga

SEQ ID NO: 20771 - DNA, 25 bp, Artificial Sequence
  Chr21_1 Forward Primer
ggattttatagcattttgtaggctg

SEQ ID NO: 20772 - DNA, 21 bp, Artificial Sequence
  Chr21_1 Forward Primer
tgacatttcaaatcagcgaag

SEQ ID NO: 20773 - DNA, 18 bp, Artificial Sequence
  Chr21_1 Forward Primer
ggtggagggccaactttt

SEQ ID NO: 20774 - DNA, 20 bp, Artificial Sequence
  Chr21_1 Forward Primer
gcacacatgcagcaagagat

SEQ ID NO: 20775 - DNA, 20 bp, Artificial Sequence
  Chr21_1 Forward Primer
tccttgtgtcttctggcctc

SEQ ID NO: 20776 - DNA, 20 bp, Artificial Sequence
  Chr21_1 Forward Primer
ggttttgtgcttcttctgcc

SEQ ID NO: 20777 - DNA, 25 bp, Artificial Sequence
  Chr21_1 Forward Primer
tcgacttagttaacagcaatgaaaa

SEQ ID NO: 20778 - DNA, 20 bp, Artificial Sequence
  Chr21_1 Forward Primer
ttggatgtgaggtgagacca

SEQ ID NO: 20779 - DNA, 21 bp, Artificial Sequence
  Chr21_1 Forward Primer
cagtcagtgttcagttgcagg

SEQ ID NO: 20780 - DNA, 20 bp, Artificial Sequence
  Chr21_1 Forward Primer
tccagaaccacattgcattt

SEQ ID NO: 20781 - DNA, 24 bp, Artificial Sequence
  Chr21_1 Forward Primer
ttcaggtggatcctatatatcgtt

SEQ ID NO: 20782 - DNA, 21 bp, Artificial Sequence
  Chr21_1 Forward Primer
tctcacaaatgtgggaaaaat

SEQ ID NO: 20783 - DNA, 20 bp, Artificial Sequence
  Chr21_1 Forward Primer
ttaatatgcctgagtggggc

SEQ ID NO: 20784 - DNA, 20 bp, Artificial Sequence
  Chr21_1 Forward Primer
ctgcttcctctgcttcacct

SEQ ID NO: 20785 - DNA, 19 bp, Artificial Sequence
  Chr21_1 Forward Primer
ctatgccagctcccaatcc

SEQ ID NO: 20786 - DNA, 22 bp, Artificial Sequence
  Chr21_1 Forward Primer
gaaattgatgggctaagtgtga

SEQ ID NO: 20787 - DNA, 20 bp, Artificial Sequence
  Chr21_1 Forward Primer
ttctaccagtccccaaccac

SEQ ID NO: 20788 - DNA, 25 bp, Artificial Sequence
  Chr21_1 Forward Primer
tcacacagtaaacacaggagttcat

SEQ ID NO: 20789 - DNA, 20 bp, Artificial Sequence
  Chr21_1 Reverse Primer
gaaggtggggtcattcattg

SEQ ID NO: 20790 - DNA, 25 bp, Artificial Sequence
  Chr21_1 Reverse Primer
ttttgcctttataatctgaaaagaa

SEQ ID NO: 20791 - DNA, 20 bp, Artificial Sequence
  Chr21_1 Reverse Primer
tccttaggttggccatacag

SEQ ID NO: 20792 - DNA, 20 bp, Artificial Sequence
  Chr21_1 Reverse Primer
tttggaaagtgttttgccac

SEQ ID NO: 20793 - DNA, 20 bp, Artificial Sequence
  Chr21_1 Reverse Primer
cacccattttgctgatgttg

SEQ ID NO: 20794 - DNA, 23 bp, Artificial Sequence
  Chr21_1 Reverse Primer
gggagcaagtagatactttccaa

SEQ ID NO: 20795 - DNA, 20 bp, Artificial Sequence
  Chr21_1 Reverse Primer
ggaatgagtgcttatggcaa

SEQ ID NO: 20796 - DNA, 20 bp, Artificial Sequence
  Chr21_1 Reverse Primer
caaagggccagtagccataa

SEQ ID NO: 20797 - DNA, 23 bp, Artificial Sequence
  Chr21_1 Reverse Primer
aaacaaaacaaacaaacaagcaa

SEQ ID NO: 20798 - DNA, 23 bp, Artificial Sequence
  Chr21_1 Reverse Primer
ttgtccttttcaaatctcaggaa

SEQ ID NO: 20799 - DNA, 22 bp, Artificial Sequence
  Chr21_1 Reverse Primer
ttgtcaagttaaatttccacgg

SEQ ID NO: 20800 - DNA, 20 bp, Artificial Sequence
  Chr21_1 Reverse Primer
ttgtcaaagcctgattgcag

SEQ ID NO: 20801 - DNA, 20 bp, Artificial Sequence
  Chr21_1 Reverse Primer
gatgggcatgctatttgctt

SEQ ID NO: 20802 - DNA, 20 bp, Artificial Sequence
  Chr21_1 Reverse Primer
tgagcagaactgtgaccagc

SEQ ID NO: 20803 - DNA, 24 bp, Artificial Sequence
  Chr21_1 Reverse Primer
tctgattttcttttctttcactgc

SEQ ID NO: 20804 - DNA, 23 bp, Artificial Sequence
  Chr21_1 Reverse Primer
aagctcagaagacaggaaaagtt

SEQ ID NO: 20805 - DNA, 20 bp, Artificial Sequence
  Chr21_1 Reverse Primer
agctgctgtaaggaagccaa

SEQ ID NO: 20806 - DNA, 20 bp, Artificial Sequence
  Chr21_1 Reverse Primer
aaggcccagagcttacccta

SEQ ID NO: 20807 - DNA, 21 bp, Artificial Sequence
  Chr21_1 Reverse Primer
tgtgtctaggaagcagggaaa

SEQ ID NO: 20808 - DNA, 21 bp, Artificial Sequence
  Chr21_1 Reverse Primer
gccacagaactctgtccttga

SEQ ID NO: 20809 - DNA, 20 bp, Artificial Sequence
  Chr21_1 Reverse Primer
cagaatgcccttttccttca

SEQ ID NO: 20810 - DNA, 23 bp, Artificial Sequence
  Chr21_1 Reverse Primer
tgaccatttattgatgcatgttt

SEQ ID NO: 20811 - DNA, 25 bp, Artificial Sequence
  Chr21_1 Reverse Primer
tcaaaatttaaaaggaacaaaagga

SEQ ID NO: 20812 - DNA, 20 bp, Artificial Sequence
  Chr21_1 Reverse Primer
caatcctttggggatttaca

SEQ ID NO: 20813 - DNA, 21 bp, Artificial Sequence
  Chr21_1 Reverse Primer
ggtaggaaatgaaatggcaga

SEQ ID NO: 20814 - DNA, 23 bp, Artificial Sequence
  Chr21_1 Reverse Primer
aggaacatgaatgacttgtgtga

SEQ ID NO: 20815 - DNA, 20 bp, Artificial Sequence
  Chr21_1 Reverse Primer
tgccaccatcccaaataaat

SEQ ID NO: 20816 - DNA, 20 bp, Artificial Sequence
  Chr21_1 Reverse Primer
atagagagggatcccgcaga

SEQ ID NO: 20817 - DNA, 20 bp, Artificial Sequence
  Chr21_1 Reverse Primer
tttggaggatgccaagtttc

SEQ ID NO: 20818 - DNA, 20 bp, Artificial Sequence
  Chr21_1 Reverse Primer
cgtaaaagaagccagatggg

SEQ ID NO: 20819 - DNA, 20 bp, Artificial Sequence
  Chr21_1 Reverse Primer
tcaagaaagccagttggtga

SEQ ID NO: 20820 - DNA, 21 bp, Artificial Sequence
  Chr21_1 Reverse Primer
tggctttcatgagaggacttt

SEQ ID NO: 20821 - DNA, 20 bp, Artificial Sequence
  Chr21_1 Reverse Primer
tgcttagcaaaaatgagcca

SEQ ID NO: 20822 - DNA, 21 bp, Artificial Sequence
  Chr21_1 Reverse Primer
gggatctggatgagaacaaga

SEQ ID NO: 20823 - DNA, 20 bp, Artificial Sequence
  Chr21_1 Reverse Primer
aattccctaggtgcaaacca

SEQ ID NO: 20824 - DNA, 20 bp, Artificial Sequence
  Chr21_1 Reverse Primer
agctgctgagatttgggtgt

SEQ ID NO: 20825 - DNA, 20 bp, Artificial Sequence
  Chr21_1 Reverse Primer
ttgcatgtacctgccctttt

SEQ ID NO: 20826 - DNA, 20 bp, Artificial Sequence
  Chr21_1 Reverse Primer
tctatgacggtgccactctg

SEQ ID NO: 20827 - DNA, 21 bp, Artificial Sequence
  Chr21_1 Reverse Primer
cagggcacttgacctcataaa

SEQ ID NO: 20828 - DNA, 22 bp, Artificial Sequence
  Chr21_1 Reverse Primer
tgaatcatggcactaggtagga

SEQ ID NO: 20829 - DNA, 24 bp, Artificial Sequence
  Chr21_1 Reverse Primer
tgaagctacaaggaaaacagaaaa

SEQ ID NO: 20830 - DNA, 21 bp, Artificial Sequence
  Chr21_1 Reverse Primer
gctcagactcaggattccaaa

SEQ ID NO: 20831 - DNA, 20 bp, Artificial Sequence
  Chr21_1 Reverse Primer
agtttcttgggcactggtgt

SEQ ID NO: 20832 - DNA, 20 bp, Artificial Sequence
  Chr21_1 Reverse Primer
cactgcttcatgctacccaa

SEQ ID NO: 20833 - DNA, 20 bp, Artificial Sequence
  Chr21_1 Reverse Primer
agtctccgagggtctgtcaa

SEQ ID NO: 20834 - DNA, 23 bp, Artificial Sequence
  Chr21_1 Reverse Primer
ggacaaatgatcactgaaacaga

SEQ ID NO: 20835 - DNA, 20 bp, Artificial Sequence
  Chr21_1 Reverse Primer
gcgcaacatcatgaggaaat

SEQ ID NO: 20836 - DNA, 20 bp, Artificial Sequence
  Chr21_1 Reverse Primer
tgtggcaggctttctctgta

SEQ ID NO: 20837 - DNA, 22 bp, Artificial Sequence
  Chr21_1 Reverse Primer
tgaaggtttgaacaatgaatgc

SEQ ID NO: 20838 - DNA, 23 bp, Artificial Sequence
  Chr21_1 Reverse Primer
tgaaaacagagatgatcgctaca

SEQ ID NO: 20839 - DNA, 23 bp, Artificial Sequence
  Chr21_1 Reverse Primer
tgataggtagggaagaaggaaaa

SEQ ID NO: 20840 - DNA, 20 bp, Artificial Sequence
  Chr21_1 Reverse Primer
tgcagatttatgggcttcct

SEQ ID NO: 20841 - DNA, 20 bp, Artificial Sequence
  Chr21_1 Reverse Primer
gatcagcttgctggtgtcaa

SEQ ID NO: 20842 - DNA, 23 bp, Artificial Sequence
  Chr21_1 Reverse Primer
tccagtttgtccttgaatttctt

SEQ ID NO: 20843 - DNA, 20 bp, Artificial Sequence
  Chr21_1 Reverse Primer
atgccccacatgttcttttc

SEQ ID NO: 20844 - DNA, 20 bp, Artificial Sequence
  Chr21_1 Reverse Primer
tcgaattcctaagtggcacc

SEQ ID NO: 20845 - DNA, 24 bp, Artificial Sequence
  Chr21_1 Reverse Primer
ttttaattgttgttctaagggtca

SEQ ID NO: 20846 - DNA, 20 bp, Artificial Sequence
  Chr21_1 Reverse Primer
gggctgagggtttgttctct

SEQ ID NO: 20847 - DNA, 20 bp, Artificial Sequence
  Chr21_1 Reverse Primer
ctcagctgcaacttcagcac

SEQ ID NO: 20848 - DNA, 22 bp, Artificial Sequence
  Chr21_1 Reverse Primer
tgttgagactctttttgggtca

SEQ ID NO: 20849 - DNA, 20 bp, Artificial Sequence
  Chr21_1 Reverse Primer
gatgtggctgctacactcca

SEQ ID NO: 20850 - DNA, 21 bp, Artificial Sequence
  Chr21_1 Reverse Primer
aactagagggctagggtgctg

SEQ ID NO: 20851 - DNA, 21 bp, Artificial Sequence
  Chr21_1 Reverse Primer
tgagacacattggctttcaga

SEQ ID NO: 20852 - DNA, 24 bp, Artificial Sequence
  Chr21_1 Reverse Primer
catttttctttccagcagtctaaa

SEQ ID NO: 20853 - DNA, 22 bp, Artificial Sequence
  Chr21_1 Reverse Primer
agttgttttcatggtccacaga

SEQ ID NO: 20854 - DNA, 21 bp, Artificial Sequence
  Chr21_1 Reverse Primer
tgctgcctgttagtagcttcc

SEQ ID NO: 20855 - DNA, 20 bp, Artificial Sequence
  Chr21_1 Reverse Primer
ccaaacaaaaactttcccca

SEQ ID NO: 20856 - DNA, 20 bp, Artificial Sequence
  Chr21_1 Reverse Primer
tgcctatgatgatccctcgt

SEQ ID NO: 20857 - DNA, 23 bp, Artificial Sequence
  Chr21_1 Reverse Primer
ggctaagccttttctaattttgc

SEQ ID NO: 20858 - DNA, 20 bp, Artificial Sequence
  Chr21_1 Reverse Primer
gacaatcaaatgggagggaa

SEQ ID NO: 20859 - DNA, 20 bp, Artificial Sequence
  Chr21_1 Reverse Primer
tggcaatgtgtaagaggctg

SEQ ID NO: 20860 - DNA, 19 bp, Artificial Sequence
  Chr21_1 Reverse Primer
taccttgaattgggagggc

SEQ ID NO: 20861 - DNA, 20 bp, Artificial Sequence
  Chr21_1 Reverse Primer
agggagctggatgactgaaa

SEQ ID NO: 20862 - DNA, 22 bp, Artificial Sequence
  Chr21_1 Reverse Primer
ggcagaatttttcctttttcaa

SEQ ID NO: 20863 - DNA, 23 bp, Artificial Sequence
  Chr21_1 Reverse Primer
tttttggtaaatattgcaagtgg

SEQ ID NO: 20864 - DNA, 20 bp, Artificial Sequence
  Chr21_1 Reverse Primer
attcatgatgggcttccaat

SEQ ID NO: 20865 - DNA, 22 bp, Artificial Sequence
  Chr21_1 Reverse Primer
tgttcctgtcttacattggcag

SEQ ID NO: 20866 - DNA, 20 bp, Artificial Sequence
  Chr21_1 Reverse Primer
gacttctcatccgcaacgat

SEQ ID NO: 20867 - DNA, 20 bp, Artificial Sequence
  Chr21_1 Reverse Primer
tcctacaggtccccttctga

SEQ ID NO: 20868 - DNA, 20 bp, Artificial Sequence
  Chr21_1 Reverse Primer
acattgcaccaaagaaagca

SEQ ID NO: 20869 - DNA, 20 bp, Artificial Sequence
  Chr21_1 Reverse Primer
atgggttattgctggtccac

SEQ ID NO: 20870 - DNA, 20 bp, Artificial Sequence
  Chr21_1 Reverse Primer
actggatggtggaagagcag

SEQ ID NO: 20871 - DNA, 20 bp, Artificial Sequence
  Chr21_1 Reverse Primer
attggttgggtcaatggaaa

SEQ ID NO: 20872 - DNA, 22 bp, Artificial Sequence
  Chr21_1 Reverse Primer
tcctctcacaatccctttcttc

SEQ ID NO: 20873 - DNA, 22 bp, Artificial Sequence
  Chr21_1 Reverse Primer
ctgtgagaaagtacgatgcaaa

SEQ ID NO: 20874 - DNA, 21 bp, Artificial Sequence
  Chr21_1 Reverse Primer
tgtgcccacaaagaacaatta

SEQ ID NO: 20875 - DNA, 20 bp, Artificial Sequence
  Chr21_1 Reverse Primer
aggactgtggcaggaactgt

SEQ ID NO: 20876 - DNA, 20 bp, Artificial Sequence
  Chr21_1 Reverse Primer
ggcattccaacaccctttta

SEQ ID NO: 20877 - DNA, 20 bp, Artificial Sequence
  Chr21_1 Reverse Primer
ggtagaggccatttgtgctg

SEQ ID NO: 20878 - DNA, 20 bp, Artificial Sequence
  Chr21_1 Reverse Primer
ttccacgaaaaatacccagc

SEQ ID NO: 20879 - DNA, 23 bp, Artificial Sequence
  Chr21_1 Reverse Primer
tttcaggatgtgctttgtaactg

SEQ ID NO: 20880 - DNA, 20 bp, Artificial Sequence
  Chr21_1 Reverse Primer
tgtgaatgggaagactcacg

SEQ ID NO: 20881 - DNA, 20 bp, Artificial Sequence
  Chr21_1 Reverse Primer
cactttgccaaatgtcttgc

SEQ ID NO: 20882 - DNA, 20 bp, Artificial Sequence
  Chr21_1 Reverse Primer
acaaggccgatcgatgtaac

SEQ ID NO: 20883 - DNA, 20 bp, Artificial Sequence
  Chr21_1 Reverse Primer
ggagatcgattgtgatgctg

SEQ ID NO: 20884 - DNA, 20 bp, Artificial Sequence
  Chr21_1 Reverse Primer
gttaccctttgcaacctccc

SEQ ID NO: 20885 - DNA, 25 bp, Artificial Sequence
  Chr21_2 Forward Primer
ttccttttattttatgcaacacaca

SEQ ID NO: 20886 - DNA, 21 bp, Artificial Sequence
  Chr21_2 Forward Primer
tccaatgtgtcacaaagctca

SEQ ID NO: 20887 - DNA, 20 bp, Artificial Sequence
  Chr21_2 Forward Primer
tgattgaagcacacgactga

SEQ ID NO: 20888 - DNA, 20 bp, Artificial Sequence
  Chr21_2 Forward Primer
cactcggttttcaatccagc

SEQ ID NO: 20889 - DNA, 21 bp, Artificial Sequence
  Chr21_2 Forward Primer
ccttcaccaatggattgtttt

SEQ ID NO: 20890 - DNA, 20 bp, Artificial Sequence
  Chr21_2 Forward Primer
gcccttatattgggaagcct

SEQ ID NO: 20891 - DNA, 20 bp, Artificial Sequence
  Chr21_2 Forward Primer
cacaggcagttttgttggac

SEQ ID NO: 20892 - DNA, 21 bp, Artificial Sequence
  Chr21_2 Forward Primer
agagcttttggaattctgtgc

SEQ ID NO: 20893 - DNA, 27 bp, Artificial Sequence
  Chr21_2 Forward Primer
tctgataaagtctatgaacaacctatg

SEQ ID NO: 20894 - DNA, 21 bp, Artificial Sequence
  Chr21_2 Forward Primer
tcaagaggatctacaggcaaa

SEQ ID NO: 20895 - DNA, 22 bp, Artificial Sequence
  Chr21_2 Forward Primer
ttcatagaacatgagcttccga

SEQ ID NO: 20896 - DNA, 20 bp, Artificial Sequence
  Chr21_2 Forward Primer
tccctgtctcagcctacaag

SEQ ID NO: 20897 - DNA, 20 bp, Artificial Sequence
  Chr21_2 Forward Primer
caacccatgccactgataaa

SEQ ID NO: 20898 - DNA, 25 bp, Artificial Sequence
  Chr21_2 Forward Primer
tcatgatacattagcaattttctgc

SEQ ID NO: 20899 - DNA, 27 bp, Artificial Sequence
  Chr21_2 Forward Primer
tctaaaaacactgagagaagtattcaa

SEQ ID NO: 20900 - DNA, 22 bp, Artificial Sequence
  Chr21_2 Forward Primer
ccagacaaagtatggcaaaaca

SEQ ID NO: 20901 - DNA, 21 bp, Artificial Sequence
  Chr21_2 Forward Primer
ggtggacattttcttcttcca

SEQ ID NO: 20902 - DNA, 26 bp, Artificial Sequence
  Chr21_2 Forward Primer
tcatttcatagtgttgactttgttca

SEQ ID NO: 20903 - DNA, 20 bp, Artificial Sequence
  Chr21_2 Forward Primer
catagccgggaagtggtaca

SEQ ID NO: 20904 - DNA, 26 bp, Artificial Sequence
  Chr21_2 Forward Primer
tgttttggagattacattaagtcttg

SEQ ID NO: 20905 - DNA, 22 bp, Artificial Sequence
  Chr21_2 Forward Primer
tgtcagtagtcctgaaatgcca

SEQ ID NO: 20906 - DNA, 20 bp, Artificial Sequence
  Chr21_2 Forward Primer
gataaaaattggccacgctg

SEQ ID NO: 20907 - DNA, 20 bp, Artificial Sequence
  Chr21_2 Forward Primer
aatcatgttgccctccaaaa

SEQ ID NO: 20908 - DNA, 21 bp, Artificial Sequence
  Chr21_2 Forward Primer
aagcaatttctggcaagatga

SEQ ID NO: 20909 - DNA, 20 bp, Artificial Sequence
  Chr21_2 Forward Primer
aactgccaaaagacttggct

SEQ ID NO: 20910 - DNA, 22 bp, Artificial Sequence
  Chr21_2 Forward Primer
ttccaaccaaacacatgttacc

SEQ ID NO: 20911 - DNA, 20 bp, Artificial Sequence
  Chr21_2 Forward Primer
ctcagaccaccccttcacat

SEQ ID NO: 20912 - DNA, 25 bp, Artificial Sequence
  Chr21_2 Forward Primer
cagattactgacttgtgaaaagcaa

SEQ ID NO: 20913 - DNA, 23 bp, Artificial Sequence
  Chr21_2 Forward Primer
tgttatgggaaaaataacatcca

SEQ ID NO: 20914 - DNA, 21 bp, Artificial Sequence
  Chr21_2 Forward Primer
tggtttccaaatgttggttct

SEQ ID NO: 20915 - DNA, 21 bp, Artificial Sequence
  Chr21_2 Forward Primer
tggcaggagaaagaagattga

SEQ ID NO: 20916 - DNA, 21 bp, Artificial Sequence
  Chr21_2 Forward Primer
tgacatgccattttctcttca

SEQ ID NO: 20917 - DNA, 20 bp, Artificial Sequence
  Chr21_2 Forward Primer
catgtgtgatggagagtccg

SEQ ID NO: 20918 - DNA, 20 bp, Artificial Sequence
  Chr21_2 Forward Primer
caatgcactagagcagcacc

SEQ ID NO: 20919 - DNA, 25 bp, Artificial Sequence
  Chr21_2 Forward Primer
tggaaatatgcataggaaagaattt

SEQ ID NO: 20920 - DNA, 20 bp, Artificial Sequence
  Chr21_2 Forward Primer
agtgtctggagcagagggag

SEQ ID NO: 20921 - DNA, 26 bp, Artificial Sequence
  Chr21_2 Forward Primer
tgcctacttttataatggcataatgt

SEQ ID NO: 20922 - DNA, 20 bp, Artificial Sequence
  Chr21_2 Forward Primer
acagcttttggcaaggaaga

SEQ ID NO: 20923 - DNA, 27 bp, Artificial Sequence
  Chr21_2 Forward Primer
tgaaaacgctatagttcaagtagtcaa

SEQ ID NO: 20924 - DNA, 20 bp, Artificial Sequence
  Chr21_2 Forward Primer
tcatcctcaacccctgtctt

SEQ ID NO: 20925 - DNA, 21 bp, Artificial Sequence
  Chr21_2 Forward Primer
ttccctgattatccaagcaaa

SEQ ID NO: 20926 - DNA, 25 bp, Artificial Sequence
  Chr21_2 Forward Primer
tgcaaatgtgaaagtaattttatgg

SEQ ID NO: 20927 - DNA, 20 bp, Artificial Sequence
  Chr21_2 Forward Primer
tggagtcttcatgctttccc

SEQ ID NO: 20928 - DNA, 20 bp, Artificial Sequence
  Chr21_2 Forward Primer
ccctgctttctctgcttttc

SEQ ID NO: 20929 - DNA, 20 bp, Artificial Sequence
  Chr21_2 Forward Primer
aacgtaaaactctgggcagg

SEQ ID NO: 20930 - DNA, 23 bp, Artificial Sequence
  Chr21_2 Forward Primer
tttttccctcttatgaaagcaca

SEQ ID NO: 20931 - DNA, 21 bp, Artificial Sequence
  Chr21_2 Forward Primer
catggaaattacagaagccca

SEQ ID NO: 20932 - DNA, 20 bp, Artificial Sequence
  Chr21_2 Forward Primer
gaaggcttcaatcacatggc

SEQ ID NO: 20933 - DNA, 20 bp, Artificial Sequence
  Chr21_2 Forward Primer
agcccaatgctaaaagggtt

SEQ ID NO: 20934 - DNA, 21 bp, Artificial Sequence
  Chr21_2 Forward Primer
ggctctttgtaaccagcaatg

SEQ ID NO: 20935 - DNA, 23 bp, Artificial Sequence
  Chr21_2 Forward Primer
tgtacctggaggacaggtagact

SEQ ID NO: 20936 - DNA, 24 bp, Artificial Sequence
  Chr21_2 Forward Primer
cacatacacaatatgacaccatca

SEQ ID NO: 20937 - DNA, 20 bp, Artificial Sequence
  Chr21_2 Forward Primer
aatgtgccaaagcataccat

SEQ ID NO: 20938 - DNA, 20 bp, Artificial Sequence
  Chr21_2 Forward Primer
agagagcctcatggtgtggt

SEQ ID NO: 20939 - DNA, 20 bp, Artificial Sequence
  Chr21_2 Forward Primer
ctcctctgaaaacaatgggg

SEQ ID NO: 20940 - DNA, 25 bp, Artificial Sequence
  Chr21_2 Forward Primer
tcaagaaaagaacaatgacaacaaa

SEQ ID NO: 20941 - DNA, 20 bp, Artificial Sequence
  Chr21_2 Forward Primer
tagggcagatggtgaagagg

SEQ ID NO: 20942 - DNA, 24 bp, Artificial Sequence
  Chr21_2 Forward Primer
tgatggtgagtgttcaaaaactgt

SEQ ID NO: 20943 - DNA, 21 bp, Artificial Sequence
  Chr21_2 Forward Primer
ttgctatgaagggaaagaggt

SEQ ID NO: 20944 - DNA, 20 bp, Artificial Sequence
  Chr21_2 Forward Primer
cagaaaacccatagggcaaa

SEQ ID NO: 20945 - DNA, 20 bp, Artificial Sequence
  Chr21_2 Forward Primer
tcgagaaggaagccttcaaa

SEQ ID NO: 20946 - DNA, 20 bp, Artificial Sequence
  Chr21_2 Forward Primer
ggatcacctggagaatgctt

SEQ ID NO: 20947 - DNA, 22 bp, Artificial Sequence
  Chr21_2 Forward Primer
gccaaaagaataaaaccccttt

SEQ ID NO: 20948 - DNA, 20 bp, Artificial Sequence
  Chr21_2 Forward Primer
cacacagaaccagaagtccg

SEQ ID NO: 20949 - DNA, 20 bp, Artificial Sequence
  Chr21_2 Forward Primer
gctacactcgccatttccat

SEQ ID NO: 20950 - DNA, 20 bp, Artificial Sequence
  Chr21_2 Forward Primer
cttctttggacccaaattgc

SEQ ID NO: 20951 - DNA, 24 bp, Artificial Sequence
  Chr21_2 Forward Primer
ggtagagagataaatggcagatgg

SEQ ID NO: 20952 - DNA, 27 bp, Artificial Sequence
  Chr21_2 Forward Primer
gatgagagacaaattgatagatgataa

SEQ ID NO: 20953 - DNA, 24 bp, Artificial Sequence
  Chr21_2 Forward Primer
tcacattgattgaaaataagcaaa

SEQ ID NO: 20954 - DNA, 27 bp, Artificial Sequence
  Chr21_2 Forward Primer
caaggaaatctattaaagagaaacgaa

SEQ ID NO: 20955 - DNA, 22 bp, Artificial Sequence
  Chr21_2 Forward Primer
tgaagaatgcacacttgtttct

SEQ ID NO: 20956 - DNA, 20 bp, Artificial Sequence
  Chr21_2 Forward Primer
agaatgtgagggaagaggca

SEQ ID NO: 20957 - DNA, 22 bp, Artificial Sequence
  Chr21_2 Forward Primer
cccgaattatgatttccaatct

SEQ ID NO: 20958 - DNA, 20 bp, Artificial Sequence
  Chr21_2 Forward Primer
tgctgaattgtttgactgcc

SEQ ID NO: 20959 - DNA, 24 bp, Artificial Sequence
  Chr21_2 Forward Primer
tctgaaataggattccacaagaga

SEQ ID NO: 20960 - DNA, 20 bp, Artificial Sequence
  Chr21_2 Forward Primer
ggatgagctccatcttcagg

SEQ ID NO: 20961 - DNA, 22 bp, Artificial Sequence
  Chr21_2 Forward Primer
tgtccctacaaggaacaagaga

SEQ ID NO: 20962 - DNA, 20 bp, Artificial Sequence
  Chr21_2 Forward Primer
cctctctctggtctggcatt

SEQ ID NO: 20963 - DNA, 26 bp, Artificial Sequence
  Chr21_2 Forward Primer
gacaaagcttataaagaagaaagtgc

SEQ ID NO: 20964 - DNA, 20 bp, Artificial Sequence
  Chr21_2 Forward Primer
ttgcatttgatggacagagc

SEQ ID NO: 20965 - DNA, 20 bp, Artificial Sequence
  Chr21_2 Forward Primer
cgttgtgggacaaacaaaac

SEQ ID NO: 20966 - DNA, 27 bp, Artificial Sequence
  Chr21_2 Forward Primer
tcataattgctttttgtttatgagatt

SEQ ID NO: 20967 - DNA, 20 bp, Artificial Sequence
  Chr21_2 Forward Primer
gccaaagcacctgagagcta

SEQ ID NO: 20968 - DNA, 20 bp, Artificial Sequence
  Chr21_2 Forward Primer
cctgtctactctccctcccc

SEQ ID NO: 20969 - DNA, 21 bp, Artificial Sequence
  Chr21_2 Forward Primer
aaaccgacatcattgaactgc

SEQ ID NO: 20970 - DNA, 25 bp, Artificial Sequence
  Chr21_2 Forward Primer
ggatgaactagcctaaaattaacca

SEQ ID NO: 20971 - DNA, 20 bp, Artificial Sequence
  Chr21_2 Forward Primer
aagacctatggaggatgccc

SEQ ID NO: 20972 - DNA, 24 bp, Artificial Sequence
  Chr21_2 Forward Primer
aacataaatgctactcatctgcca

SEQ ID NO: 20973 - DNA, 20 bp, Artificial Sequence
  Chr21_2 Forward Primer
tggatgatcagaaaatggca

SEQ ID NO: 20974 - DNA, 20 bp, Artificial Sequence
  Chr21_2 Forward Primer
ttaacaatttgggaagggca

SEQ ID NO: 20975 - DNA, 20 bp, Artificial Sequence
  Chr21_2 Forward Primer
taaagactttgcctcccagg

SEQ ID NO: 20976 - DNA, 24 bp, Artificial Sequence
  Chr21_2 Forward Primer
tcaaactgttctgaagaatgctgt

SEQ ID NO: 20977 - DNA, 21 bp, Artificial Sequence
  Chr21_2 Forward Primer
tgtgccttatctactccaggc

SEQ ID NO: 20978 - DNA, 20 bp, Artificial Sequence
  Chr21_2 Forward Primer
cactactggggaccaggcta

SEQ ID NO: 20979 - DNA, 20 bp, Artificial Sequence
  Chr21_2 Forward Primer
gtgtgttggaacctcctgtg

SEQ ID NO: 20980 - DNA, 20 bp, Artificial Sequence
  Chr21_2 Forward Primer
taggaagcattgttctgggc

SEQ ID NO: 20981 - DNA, 22 bp, Artificial Sequence
  Chr21_2 Reverse Primer
tgaacctgtttttactgcatgg

SEQ ID NO: 20982 - DNA, 20 bp, Artificial Sequence
  Chr21_2 Reverse Primer
gcatggtgcactcactcaaa

SEQ ID NO: 20983 - DNA, 20 bp, Artificial Sequence
  Chr21_2 Reverse Primer
caggcctctccaattgtgtt

SEQ ID NO: 20984 - DNA, 20 bp, Artificial Sequence
  Chr21_2 Reverse Primer
ggccattcgctaactctcac

SEQ ID NO: 20985 - DNA, 24 bp, Artificial Sequence
  Chr21_2 Reverse Primer
aactttaccaaatattgccactgt

SEQ ID NO: 20986 - DNA, 20 bp, Artificial Sequence
  Chr21_2 Reverse Primer
gccaacatttcatacatgcc

SEQ ID NO: 20987 - DNA, 20 bp, Artificial Sequence
  Chr21_2 Reverse Primer
gcctttgattgtaagcaggc

SEQ ID NO: 20988 - DNA, 23 bp, Artificial Sequence
  Chr21_2 Reverse Primer
tttctcttcttccatcaacttcg

SEQ ID NO: 20989 - DNA, 27 bp, Artificial Sequence
  Chr21_2 Reverse Primer
agtattatttttcttttccagtccttt

SEQ ID NO: 20990 - DNA, 20 bp, Artificial Sequence
  Chr21_2 Reverse Primer
tccttggggttttgactacg

SEQ ID NO: 20991 - DNA, 21 bp, Artificial Sequence
  Chr21_2 Reverse Primer
tttttccattcagatagccaa

SEQ ID NO: 20992 - DNA, 26 bp, Artificial Sequence
  Chr21_2 Reverse Primer
gcttttatcatttttctcatctcaca

SEQ ID NO: 20993 - DNA, 20 bp, Artificial Sequence
  Chr21_2 Reverse Primer
acagcccctctagcatttga

SEQ ID NO: 20994 - DNA, 22 bp, Artificial Sequence
  Chr21_2 Reverse Primer
ggtacttcattcctcttcacca

SEQ ID NO: 20995 - DNA, 20 bp, Artificial Sequence
  Chr21_2 Reverse Primer
cttctcctttcttgcctccc

SEQ ID NO: 20996 - DNA, 23 bp, Artificial Sequence
  Chr21_2 Reverse Primer
gccatttcacaagaacatacaca

SEQ ID NO: 20997 - DNA, 20 bp, Artificial Sequence
  Chr21_2 Reverse Primer
tctattgcaagcaatgcagc

SEQ ID NO: 20998 - DNA, 20 bp, Artificial Sequence
  Chr21_2 Reverse Primer
agctgagccattgggtgtat

SEQ ID NO: 20999 - DNA, 21 bp, Artificial Sequence
  Chr21_2 Reverse Primer
cgcttccatactaccagtcca

SEQ ID NO: 21000 - DNA, 23 bp, Artificial Sequence
  Chr21_2 Reverse Primer
caggcatgtcatgaatatgagaa

SEQ ID NO: 21001 - DNA, 22 bp, Artificial Sequence
  Chr21_2 Reverse Primer
ccgaaatcaccttttatcatca

SEQ ID NO: 21002 - DNA, 20 bp, Artificial Sequence
  Chr21_2 Reverse Primer
cgtgatgagatgagagtggg

SEQ ID NO: 21003 - DNA, 20 bp, Artificial Sequence
  Chr21_2 Reverse Primer
cagggagaaggtaggagagc

SEQ ID NO: 21004 - DNA, 20 bp, Artificial Sequence
  Chr21_2 Reverse Primer
ttttggatgttccaagcaca

SEQ ID NO: 21005 - DNA, 22 bp, Artificial Sequence
  Chr21_2 Reverse Primer
ccgatggaaatttttacaaggt

SEQ ID NO: 21006 - DNA, 23 bp, Artificial Sequence
  Chr21_2 Reverse Primer
aagaaaagccattgtattgagca

SEQ ID NO: 21007 - DNA, 22 bp, Artificial Sequence
  Chr21_2 Reverse Primer
aaatgcaaacatgcataactgg

SEQ ID NO: 21008 - DNA, 20 bp, Artificial Sequence
  Chr21_2 Reverse Primer
agaagcaaactgcccttctg

SEQ ID NO: 21009 - DNA, 20 bp, Artificial Sequence
  Chr21_2 Reverse Primer
cacaagggtgagttgctcct

SEQ ID NO: 21010 - DNA, 23 bp, Artificial Sequence
  Chr21_2 Reverse Primer
aacccaaaactacctctcaaaca

SEQ ID NO: 21011 - DNA, 22 bp, Artificial Sequence
  Chr21_2 Reverse Primer
agttggagctttatgggaaaca

SEQ ID NO: 21012 - DNA, 20 bp, Artificial Sequence
  Chr21_2 Reverse Primer
tagtgggtgatgccaaaaca

SEQ ID NO: 21013 - DNA, 20 bp, Artificial Sequence
  Chr21_2 Reverse Primer
tcacctaagtggcaatccaa

SEQ ID NO: 21014 - DNA, 25 bp, Artificial Sequence
  Chr21_2 Reverse Primer
caaggagtcttactgatcctgtctt

SEQ ID NO: 21015 - DNA, 20 bp, Artificial Sequence
  Chr21_2 Reverse Primer
acaccacggataatgtgcaa

SEQ ID NO: 21016 - DNA, 20 bp, Artificial Sequence
  Chr21_2 Reverse Primer
cccttagctgcaatttgctt

SEQ ID NO: 21017 - DNA, 21 bp, Artificial Sequence
  Chr21_2 Reverse Primer
ttcatgttaactctctcccca

SEQ ID NO: 21018 - DNA, 22 bp, Artificial Sequence
  Chr21_2 Reverse Primer
tgaattgagaaaatgaagtgga

SEQ ID NO: 21019 - DNA, 20 bp, Artificial Sequence
  Chr21_2 Reverse Primer
caattgtgcacagatggagg

SEQ ID NO: 21020 - DNA, 21 bp, Artificial Sequence
  Chr21_2 Reverse Primer
tggtaatgggtgcttgacttc

SEQ ID NO: 21021 - DNA, 23 bp, Artificial Sequence
  Chr21_2 Reverse Primer
ttgtgatatcaacgaattctcca

SEQ ID NO: 21022 - DNA, 21 bp, Artificial Sequence
  Chr21_2 Reverse Primer
ggcaacataaaaagacccaag

SEQ ID NO: 21023 - DNA, 20 bp, Artificial Sequence
  Chr21_2 Reverse Primer
cgttagcaggtttggcctta

SEQ ID NO: 21024 - DNA, 20 bp, Artificial Sequence
  Chr21_2 Reverse Primer
tgagctgatttctcagggct

SEQ ID NO: 21025 - DNA, 27 bp, Artificial Sequence
  Chr21_2 Reverse Primer
tcctttatttaaacataatcttgaggc

SEQ ID NO: 21026 - DNA, 24 bp, Artificial Sequence
  Chr21_2 Reverse Primer
ggttaagaaattccactgaaacca

SEQ ID NO: 21027 - DNA, 20 bp, Artificial Sequence
  Chr21_2 Reverse Primer
tgctctgatgtaggcctgag

SEQ ID NO: 21028 - DNA, 20 bp, Artificial Sequence
  Chr21_2 Reverse Primer
gtacaatgtcaaccccaccc

SEQ ID NO: 21029 - DNA, 20 bp, Artificial Sequence
  Chr21_2 Reverse Primer
actgcttgcatcctgtctcc

SEQ ID NO: 21030 - DNA, 20 bp, Artificial Sequence
  Chr21_2 Reverse Primer
ggccactaactccatgacca

SEQ ID NO: 21031 - DNA, 21 bp, Artificial Sequence
  Chr21_2 Reverse Primer
gagattgattttcctgagcca

SEQ ID NO: 21032 - DNA, 20 bp, Artificial Sequence
  Chr21_2 Reverse Primer
tgacaatccaaaaatggctg

SEQ ID NO: 21033 - DNA, 20 bp, Artificial Sequence
  Chr21_2 Reverse Primer
ctgacgtagccttccctttg

SEQ ID NO: 21034 - DNA, 20 bp, Artificial Sequence
  Chr21_2 Reverse Primer
tcactggggttgatgtgaga

SEQ ID NO: 21035 - DNA, 27 bp, Artificial Sequence
  Chr21_2 Reverse Primer
aagatattgtcatataaggtccaagca

SEQ ID NO: 21036 - DNA, 22 bp, Artificial Sequence
  Chr21_2 Reverse Primer
tttaatgtaaaaagacccagcc

SEQ ID NO: 21037 - DNA, 20 bp, Artificial Sequence
  Chr21_2 Reverse Primer
gaccctggtcaacatggaac

SEQ ID NO: 21038 - DNA, 22 bp, Artificial Sequence
  Chr21_2 Reverse Primer
tggctgactgaatgaatgattt

SEQ ID NO: 21039 - DNA, 23 bp, Artificial Sequence
  Chr21_2 Reverse Primer
tccctgcttcatctctacattct

SEQ ID NO: 21040 - DNA, 20 bp, Artificial Sequence
  Chr21_2 Reverse Primer
tctcagatggcctgagaaca

SEQ ID NO: 21041 - DNA, 20 bp, Artificial Sequence
  Chr21_2 Reverse Primer
atttggaagccatggaacac

SEQ ID NO: 21042 - DNA, 20 bp, Artificial Sequence
  Chr21_2 Reverse Primer
ggacttgccaccaacctaaa

SEQ ID NO: 21043 - DNA, 20 bp, Artificial Sequence
  Chr21_2 Reverse Primer
aagaaggaaaggcaccaagg

SEQ ID NO: 21044 - DNA, 20 bp, Artificial Sequence
  Chr21_2 Reverse Primer
agcaaaagcttggaggaatg

SEQ ID NO: 21045 - DNA, 20 bp, Artificial Sequence
  Chr21_2 Reverse Primer
tgtacatccaaggacagcga

SEQ ID NO: 21046 - DNA, 21 bp, Artificial Sequence
  Chr21_2 Reverse Primer
ccacctaacttcctctccctc

SEQ ID NO: 21047 - DNA, 20 bp, Artificial Sequence
  Chr21_2 Reverse Primer
aatccacaccaaagtggagg

SEQ ID NO: 21048 - DNA, 24 bp, Artificial Sequence
  Chr21_2 Reverse Primer
aaaagctcacagatttatatgcaa

SEQ ID NO: 21049 - DNA, 22 bp, Artificial Sequence
  Chr21_2 Reverse Primer
gctatgttgccttagtcttccc

SEQ ID NO: 21050 - DNA, 22 bp, Artificial Sequence
  Chr21_2 Reverse Primer
tccaacacaaaattcctgatga

SEQ ID NO: 21051 - DNA, 20 bp, Artificial Sequence
  Chr21_2 Reverse Primer
agggaaaggagaaaaggacg

SEQ ID NO: 21052 - DNA, 22 bp, Artificial Sequence
  Chr21_2 Reverse Primer
caattggactttttgttcctga

SEQ ID NO: 21053 - DNA, 23 bp, Artificial Sequence
  Chr21_2 Reverse Primer
tttttcacaagagagcaaagact

SEQ ID NO: 21054 - DNA, 22 bp, Artificial Sequence
  Chr21_2 Reverse Primer
gaaaggatcatggatattggga

SEQ ID NO: 21055 - DNA, 20 bp, Artificial Sequence
  Chr21_2 Reverse Primer
ttcagtatcctggggttcca

SEQ ID NO: 21056 - DNA, 20 bp, Artificial Sequence
  Chr21_2 Reverse Primer
taattgtgggggtgctgatt

SEQ ID NO: 21057 - DNA, 23 bp, Artificial Sequence
  Chr21_2 Reverse Primer
tggtggtatgcttcattcattac

SEQ ID NO: 21058 - DNA, 20 bp, Artificial Sequence
  Chr21_2 Reverse Primer
tggtgcttgaaattcccact

SEQ ID NO: 21059 - DNA, 22 bp, Artificial Sequence
  Chr21_2 Reverse Primer
cacctatggttgcattatgtga

SEQ ID NO: 21060 - DNA, 20 bp, Artificial Sequence
  Chr21_2 Reverse Primer
ttctgcgaaaccattcacac

SEQ ID NO: 21061 - DNA, 22 bp, Artificial Sequence
  Chr21_2 Reverse Primer
aagtggaccagaaagaaattcg

SEQ ID NO: 21062 - DNA, 26 bp, Artificial Sequence
  Chr21_2 Reverse Primer
tctggcttatgttagataaagagcac

SEQ ID NO: 21063 - DNA, 24 bp, Artificial Sequence
  Chr21_2 Reverse Primer
tggtttatccagcataatttctca

SEQ ID NO: 21064 - DNA, 20 bp, Artificial Sequence
  Chr21_2 Reverse Primer
atggccagttttccattagc

SEQ ID NO: 21065 - DNA, 20 bp, Artificial Sequence
  Chr21_2 Reverse Primer
ccaaaatgaacccacttcca

SEQ ID NO: 21066 - DNA, 20 bp, Artificial Sequence
  Chr21_2 Reverse Primer
cactgaggtctgatgccaaa

SEQ ID NO: 21067 - DNA, 20 bp, Artificial Sequence
  Chr21_2 Reverse Primer
atgtgctaagtgcggctttt

SEQ ID NO: 21068 - DNA, 23 bp, Artificial Sequence
  Chr21_2 Reverse Primer
aaagaacatcttctattgcaggc

SEQ ID NO: 21069 - DNA, 20 bp, Artificial Sequence
  Chr21_2 Reverse Primer
tgtgcaaaggaaatggtgaa

SEQ ID NO: 21070 - DNA, 20 bp, Artificial Sequence
  Chr21_2 Reverse Primer
agagcacagctcacagggat

SEQ ID NO: 21071 - DNA, 20 bp, Artificial Sequence
  Chr21_2 Reverse Primer
aacacttccaaaaggctccc

SEQ ID NO: 21072 - DNA, 22 bp, Artificial Sequence
  Chr21_2 Reverse Primer
ctaagttgggccatgtttattt

SEQ ID NO: 21073 - DNA, 20 bp, Artificial Sequence
  Chr21_2 Reverse Primer
cagggccatggacttacact

SEQ ID NO: 21074 - DNA, 23 bp, Artificial Sequence
  Chr21_2 Reverse Primer
gcatatgattgtagaggtggagc

SEQ ID NO: 21075 - DNA, 20 bp, Artificial Sequence
  Chr21_2 Reverse Primer
ttgctgcaggttcaattcag

SEQ ID NO: 21076 - DNA, 20 bp, Artificial Sequence
  Chr21_2 Reverse Primer
cagtgaccagcctttgttca

SEQ ID NO: 21077 - DNA, 22 bp, Artificial Sequence
  Chr21_3 Forward Primer
attctcactggttgctttctcc

SEQ ID NO: 21078 - DNA, 20 bp, Artificial Sequence
  Chr21_3 Forward Primer
tactcagaaagccatgtgcg

SEQ ID NO: 21079 - DNA, 20 bp, Artificial Sequence
  Chr21_3 Forward Primer
caagccaatcattctttccc

SEQ ID NO: 21080 - DNA, 20 bp, Artificial Sequence
  Chr21_3 Forward Primer
ttccggaagtgtacccaaag

SEQ ID NO: 21081 - DNA, 20 bp, Artificial Sequence
  Chr21_3 Forward Primer
ccagaaactcatccttccca

SEQ ID NO: 21082 - DNA, 22 bp, Artificial Sequence
  Chr21_3 Forward Primer
aaaaacctccaagaaaaagcaa

SEQ ID NO: 21083 - DNA, 20 bp, Artificial Sequence
  Chr21_3 Forward Primer
caccacctagggatgaggaa

SEQ ID NO: 21084 - DNA, 21 bp, Artificial Sequence
  Chr21_3 Forward Primer
tggcaggacttatcactccac

SEQ ID NO: 21085 - DNA, 20 bp, Artificial Sequence
  Chr21_3 Forward Primer
ctgatcagagccttcctcaa

SEQ ID NO: 21086 - DNA, 20 bp, Artificial Sequence
  Chr21_3 Forward Primer
accaggcaaagagtgaatgc

SEQ ID NO: 21087 - DNA, 20 bp, Artificial Sequence
  Chr21_3 Forward Primer
gcacacagaaggcaacagaa

SEQ ID NO: 21088 - DNA, 22 bp, Artificial Sequence
  Chr21_3 Forward Primer
gctggaaaagattctgatttgg

SEQ ID NO: 21089 - DNA, 20 bp, Artificial Sequence
  Chr21_3 Forward Primer
cctccccactcacgctatta

SEQ ID NO: 21090 - DNA, 20 bp, Artificial Sequence
  Chr21_3 Forward Primer
atgtgcatttttccagaccc

SEQ ID NO: 21091 - DNA, 25 bp, Artificial Sequence
  Chr21_3 Forward Primer
tctgaaatacttttcaacgtcaaac

SEQ ID NO: 21092 - DNA, 20 bp, Artificial Sequence
  Chr21_3 Forward Primer
tttctgcatcaatagcaggg

SEQ ID NO: 21093 - DNA, 26 bp, Artificial Sequence
  Chr21_3 Forward Primer
tttgataaggaactggtgtacatctt

SEQ ID NO: 21094 - DNA, 20 bp, Artificial Sequence
  Chr21_3 Forward Primer
aaatattgcaaaaggtggcg

SEQ ID NO: 21095 - DNA, 20 bp, Artificial Sequence
  Chr21_3 Forward Primer
cgagggtggaagttaaagga

SEQ ID NO: 21096 - DNA, 21 bp, Artificial Sequence
  Chr21_3 Forward Primer
gaaagcaagagctacaggacc

SEQ ID NO: 21097 - DNA, 20 bp, Artificial Sequence
  Chr21_3 Forward Primer
acacctactgaaacgccaca

SEQ ID NO: 21098 - DNA, 23 bp, Artificial Sequence
  Chr21_3 Forward Primer
ccctatttctggagttgaatgtt

SEQ ID NO: 21099 - DNA, 21 bp, Artificial Sequence
  Chr21_3 Forward Primer
tcttttccctttccttttcca

SEQ ID NO: 21100 - DNA, 20 bp, Artificial Sequence
  Chr21_3 Forward Primer
gccctcaaagccactgatta

SEQ ID NO: 21101 - DNA, 23 bp, Artificial Sequence
  Chr21_3 Forward Primer
tgtgcagtacaaataaaaccaca

SEQ ID NO: 21102 - DNA, 20 bp, Artificial Sequence
  Chr21_3 Forward Primer
accatatgctccagctcaca

SEQ ID NO: 21103 - DNA, 20 bp, Artificial Sequence
  Chr21_3 Forward Primer
tacacagggaaattcagccc

SEQ ID NO: 21104 - DNA, 20 bp, Artificial Sequence
  Chr21_3 Forward Primer
aaatcattcacggccatctc

SEQ ID NO: 21105 - DNA, 20 bp, Artificial Sequence
  Chr21_3 Forward Primer
tcgttcgtctcctccaatct

SEQ ID NO: 21106 - DNA, 23 bp, Artificial Sequence
  Chr21_3 Forward Primer
cgacagaatttatcctttcactg

SEQ ID NO: 21107 - DNA, 26 bp, Artificial Sequence
  Chr21_3 Forward Primer
aaagatatgctgtacctaattcacaa

SEQ ID NO: 21108 - DNA, 24 bp, Artificial Sequence
  Chr21_3 Forward Primer
ccccaagaatcgtaataatagctg

SEQ ID NO: 21109 - DNA, 20 bp, Artificial Sequence
  Chr21_3 Forward Primer
aagatgctcagaagcggcta

SEQ ID NO: 21110 - DNA, 20 bp, Artificial Sequence
  Chr21_3 Forward Primer
gtttactggttggcccagaa

SEQ ID NO: 21111 - DNA, 27 bp, Artificial Sequence
  Chr21_3 Forward Primer
agcaatatacattcattaccatcttga

SEQ ID NO: 21112 - DNA, 20 bp, Artificial Sequence
  Chr21_3 Forward Primer
tcctgagctgaaatcccatc

SEQ ID NO: 21113 - DNA, 23 bp, Artificial Sequence
  Chr21_3 Forward Primer
gccttaagtagaaattacaggcg

SEQ ID NO: 21114 - DNA, 20 bp, Artificial Sequence
  Chr21_3 Forward Primer
ccaggatgtttatcacagca

SEQ ID NO: 21115 - DNA, 20 bp, Artificial Sequence
  Chr21_3 Forward Primer
aggaagccaaatggttttga

SEQ ID NO: 21116 - DNA, 21 bp, Artificial Sequence
  Chr21_3 Forward Primer
tcgtttctttttaatgcctcg

SEQ ID NO: 21117 - DNA, 20 bp, Artificial Sequence
  Chr21_3 Forward Primer
cctcacccagaaggaatctg

SEQ ID NO: 21118 - DNA, 23 bp, Artificial Sequence
  Chr21_3 Forward Primer
tgatcattctgtgtcgactttca

SEQ ID NO: 21119 - DNA, 20 bp, Artificial Sequence
  Chr21_3 Forward Primer
ttcctgatgaagaaatgccc

SEQ ID NO: 21120 - DNA, 20 bp, Artificial Sequence
  Chr21_3 Forward Primer
tgtttttccatcctcatcgc

SEQ ID NO: 21121 - DNA, 21 bp, Artificial Sequence
  Chr21_3 Forward Primer
ggcatgcttttcctaaaattg

SEQ ID NO: 21122 - DNA, 20 bp, Artificial Sequence
  Chr21_3 Forward Primer
aatgttccttgcctttgctg

SEQ ID NO: 21123 - DNA, 20 bp, Artificial Sequence
  Chr21_3 Forward Primer
gggtgagatgagaaagccaa

SEQ ID NO: 21124 - DNA, 27 bp, Artificial Sequence
  Chr21_3 Forward Primer
tttattttgtttgctaggtcagtaaaa

SEQ ID NO: 21125 - DNA, 21 bp, Artificial Sequence
  Chr21_3 Forward Primer
tctcccatttatttgctgtga

SEQ ID NO: 21126 - DNA, 20 bp, Artificial Sequence
  Chr21_3 Forward Primer
ctctgggcttgagacctttg

SEQ ID NO: 21127 - DNA, 23 bp, Artificial Sequence
  Chr21_3 Forward Primer
aagaacagttagtgtcaacgtgc

SEQ ID NO: 21128 - DNA, 20 bp, Artificial Sequence
  Chr21_3 Forward Primer
tccatttctccttgccagtc

SEQ ID NO: 21129 - DNA, 20 bp, Artificial Sequence
  Chr21_3 Forward Primer
agacctggggttcaaaggat

SEQ ID NO: 21130 - DNA, 20 bp, Artificial Sequence
  Chr21_3 Forward Primer
cctggcccatcaaattaaca

SEQ ID NO: 21131 - DNA, 23 bp, Artificial Sequence
  Chr21_3 Forward Primer
caaggaataaggaggaaaaagga

SEQ ID NO: 21132 - DNA, 21 bp, Artificial Sequence
  Chr21_3 Forward Primer
tgtccacaatctccacagaca

SEQ ID NO: 21133 - DNA, 20 bp, Artificial Sequence
  Chr21_3 Forward Primer
attcccggatccgctactat

SEQ ID NO: 21134 - DNA, 20 bp, Artificial Sequence
  Chr21_3 Forward Primer
acaaagtggggatgggtctt

SEQ ID NO: 21135 - DNA, 20 bp, Artificial Sequence
  Chr21_3 Forward Primer
gcctgctctacctctgacca

SEQ ID NO: 21136 - DNA, 27 bp, Artificial Sequence
  Chr21_3 Forward Primer
tgtaatgtcctaaacaaacgttacagt

SEQ ID NO: 21137 - DNA, 20 bp, Artificial Sequence
  Chr21_3 Forward Primer
gccccttgctttgattactg

SEQ ID NO: 21138 - DNA, 20 bp, Artificial Sequence
  Chr21_3 Forward Primer
gatcacactccaggggctaa

SEQ ID NO: 21139 - DNA, 20 bp, Artificial Sequence
  Chr21_3 Forward Primer
atgaccaacaggtggaggag

SEQ ID NO: 21140 - DNA, 20 bp, Artificial Sequence
  Chr21_3 Forward Primer
tgcaggcactttagatcaca

SEQ ID NO: 21141 - DNA, 20 bp, Artificial Sequence
  Chr21_3 Forward Primer
caaccctgctgagaatttcc

SEQ ID NO: 21142 - DNA, 20 bp, Artificial Sequence
  Chr21_3 Forward Primer
ggggcttttccctaaagact

SEQ ID NO: 21143 - DNA, 22 bp, Artificial Sequence
  Chr21_3 Forward Primer
tttctttgcagcatctcaaatc

SEQ ID NO: 21144 - DNA, 20 bp, Artificial Sequence
  Chr21_3 Forward Primer
acccaagcctctgtcagcta

SEQ ID NO: 21145 - DNA, 20 bp, Artificial Sequence
  Chr21_3 Forward Primer
atctgtactgcctgcctggt

SEQ ID NO: 21146 - DNA, 20 bp, Artificial Sequence
  Chr21_3 Forward Primer
gggatgtgcatttggattct

SEQ ID NO: 21147 - DNA, 20 bp, Artificial Sequence
  Chr21_3 Forward Primer
attctgctgatgggctgtct

SEQ ID NO: 21148 - DNA, 20 bp, Artificial Sequence
  Chr21_3 Forward Primer
atgggcttttgagggaaagt

SEQ ID NO: 21149 - DNA, 21 bp, Artificial Sequence
  Chr21_3 Forward Primer
cctggtcaccatcagaatgtt

SEQ ID NO: 21150 - DNA, 20 bp, Artificial Sequence
  Chr21_3 Forward Primer
aggccacctaagacaggtga

SEQ ID NO: 21151 - DNA, 20 bp, Artificial Sequence
  Chr21_3 Forward Primer
ggattgctggagaacctgaa

SEQ ID NO: 21152 - DNA, 21 bp, Artificial Sequence
  Chr21_3 Forward Primer
gcttttccataccagtccctt

SEQ ID NO: 21153 - DNA, 21 bp, Artificial Sequence
  Chr21_3 Forward Primer
aaaccaagacaaagcatgtcc

SEQ ID NO: 21154 - DNA, 20 bp, Artificial Sequence
  Chr21_3 Forward Primer
aaagcaaaggcggtaaaatg

SEQ ID NO: 21155 - DNA, 22 bp, Artificial Sequence
  Chr21_3 Forward Primer
caattgtgaaaacacaagcaga

SEQ ID NO: 21156 - DNA, 21 bp, Artificial Sequence
  Chr21_3 Forward Primer
ccaattttcagcctacaaggg

SEQ ID NO: 21157 - DNA, 20 bp, Artificial Sequence
  Chr21_3 Forward Primer
tgtgctttgtttgctgatcc

SEQ ID NO: 21158 - DNA, 20 bp, Artificial Sequence
  Chr21_3 Forward Primer
cggcccaagttctctcttta

SEQ ID NO: 21159 - DNA, 20 bp, Artificial Sequence
  Chr21_3 Forward Primer
atcatgaatgaggggatgga

SEQ ID NO: 21160 - DNA, 25 bp, Artificial Sequence
  Chr21_3 Forward Primer
tgcaattttctaaattttcttcaca

SEQ ID NO: 21161 - DNA, 21 bp, Artificial Sequence
  Chr21_3 Forward Primer
tgcatgcttaatgtgtttgga

SEQ ID NO: 21162 - DNA, 20 bp, Artificial Sequence
  Chr21_3 Forward Primer
cgattgggaaagaggaaaga

SEQ ID NO: 21163 - DNA, 23 bp, Artificial Sequence
  Chr21_3 Forward Primer
caacaaaacaacccagtaacaca

SEQ ID NO: 21164 - DNA, 20 bp, Artificial Sequence
  Chr21_3 Forward Primer
cgtgaattttcatggtgctg

SEQ ID NO: 21165 - DNA, 20 bp, Artificial Sequence
  Chr21_3 Forward Primer
atggcaacagaggagatggt

SEQ ID NO: 21166 - DNA, 20 bp, Artificial Sequence
  Chr21_3 Forward Primer
atgtggaaagtggcaggaag

SEQ ID NO: 21167 - DNA, 20 bp, Artificial Sequence
  Chr21_3 Forward Primer
tcttctattttgcccatgcc

SEQ ID NO: 21168 - DNA, 20 bp, Artificial Sequence
  Chr21_3 Forward Primer
aggtcgtggctaccaacatc

SEQ ID NO: 21169 - DNA, 20 bp, Artificial Sequence
  Chr21_3 Forward Primer
agctgactcaccattgaccc

SEQ ID NO: 21170 - DNA, 20 bp, Artificial Sequence
  Chr21_3 Forward Primer
caccccatagcaatgcaagt

SEQ ID NO: 21171 - DNA, 20 bp, Artificial Sequence
  Chr21_3 Forward Primer
aactgctttccgtttgcatc

SEQ ID NO: 21172 - DNA, 20 bp, Artificial Sequence
  Chr21_3 Forward Primer
tagctgaccctttgtgaccc

SEQ ID NO: 21173 - DNA, 22 bp, Artificial Sequence
  Chr21_3 Reverse Primer
aatgacttgtggttcttttgcc

SEQ ID NO: 21174 - DNA, 20 bp, Artificial Sequence
  Chr21_3 Reverse Primer
gtcagagaactggagggctg

SEQ ID NO: 21175 - DNA, 20 bp, Artificial Sequence
  Chr21_3 Reverse Primer
taccctgcaattggaagcat

SEQ ID NO: 21176 - DNA, 20 bp, Artificial Sequence
  Chr21_3 Reverse Primer
ctcctcttgttgtggggaaa

SEQ ID NO: 21177 - DNA, 20 bp, Artificial Sequence
  Chr21_3 Reverse Primer
atcaaaagcatgtgggtggt

SEQ ID NO: 21178 - DNA, 20 bp, Artificial Sequence
  Chr21_3 Reverse Primer
atgcctggtaaaaggtggtg

SEQ ID NO: 21179 - DNA, 20 bp, Artificial Sequence
  Chr21_3 Reverse Primer
cacagaggcgtggtaacaga

SEQ ID NO: 21180 - DNA, 20 bp, Artificial Sequence
  Chr21_3 Reverse Primer
tgagcctcagcaggtgtaga

SEQ ID NO: 21181 - DNA, 21 bp, Artificial Sequence
  Chr21_3 Reverse Primer
cctggaaggaacagacgtttt

SEQ ID NO: 21182 - DNA, 20 bp, Artificial Sequence
  Chr21_3 Reverse Primer
gtttgagtggggtcaggaaa

SEQ ID NO: 21183 - DNA, 21 bp, Artificial Sequence
  Chr21_3 Reverse Primer
gggttaaaacacagcagatcc

SEQ ID NO: 21184 - DNA, 20 bp, Artificial Sequence
  Chr21_3 Reverse Primer
ttttcttcctcgtgggtgac

SEQ ID NO: 21185 - DNA, 20 bp, Artificial Sequence
  Chr21_3 Reverse Primer
acccattagctgttttcccc

SEQ ID NO: 21186 - DNA, 22 bp, Artificial Sequence
  Chr21_3 Reverse Primer
aaaacagatgtggtctcagcaa

SEQ ID NO: 21187 - DNA, 22 bp, Artificial Sequence
  Chr21_3 Reverse Primer
tggactagcaccagaatcaact

SEQ ID NO: 21188 - DNA, 20 bp, Artificial Sequence
  Chr21_3 Reverse Primer
gagaactcgtgaacatggca

SEQ ID NO: 21189 - DNA, 20 bp, Artificial Sequence
  Chr21_3 Reverse Primer
ctggggttgtccattttctc

SEQ ID NO: 21190 - DNA, 20 bp, Artificial Sequence
  Chr21_3 Reverse Primer
cttgagctccagggaatgag

SEQ ID NO: 21191 - DNA, 20 bp, Artificial Sequence
  Chr21_3 Reverse Primer
ctgaattcctgggcatctgt

SEQ ID NO: 21192 - DNA, 20 bp, Artificial Sequence
  Chr21_3 Reverse Primer
agcttcagttcccccaaatc

SEQ ID NO: 21193 - DNA, 20 bp, Artificial Sequence
  Chr21_3 Reverse Primer
acgcctggccttaagaatta

SEQ ID NO: 21194 - DNA, 20 bp, Artificial Sequence
  Chr21_3 Reverse Primer
cagaagatgtggagcagcaa

SEQ ID NO: 21195 - DNA, 20 bp, Artificial Sequence
  Chr21_3 Reverse Primer
atggttaaccctttcctgcg

SEQ ID NO: 21196 - DNA, 20 bp, Artificial Sequence
  Chr21_3 Reverse Primer
acgctgtaaattctgggcat

SEQ ID NO: 21197 - DNA, 20 bp, Artificial Sequence
  Chr21_3 Reverse Primer
gggatgttccagggaaagta

SEQ ID NO: 21198 - DNA, 20 bp, Artificial Sequence
  Chr21_3 Reverse Primer
tgacacgtgtttgttcagga

SEQ ID NO: 21199 - DNA, 24 bp, Artificial Sequence
  Chr21_3 Reverse Primer
caagtcaagttactgttaaaggcg

SEQ ID NO: 21200 - DNA, 21 bp, Artificial Sequence
  Chr21_3 Reverse Primer
cgcctaagtatgagcgttctg

SEQ ID NO: 21201 - DNA, 20 bp, Artificial Sequence
  Chr21_3 Reverse Primer
ttccctcttccatatcccct

SEQ ID NO: 21202 - DNA, 23 bp, Artificial Sequence
  Chr21_3 Reverse Primer
tcaattagcactgaggaaaagaa

SEQ ID NO: 21203 - DNA, 19 bp, Artificial Sequence
  Chr21_3 Reverse Primer
ctttgccatgaaacccaag

SEQ ID NO: 21204 - DNA, 20 bp, Artificial Sequence
  Chr21_3 Reverse Primer
cctgccgagtttgatgtttt

SEQ ID NO: 21205 - DNA, 20 bp, Artificial Sequence
  Chr21_3 Reverse Primer
aattcccacaccatttcagc

SEQ ID NO: 21206 - DNA, 22 bp, Artificial Sequence
  Chr21_3 Reverse Primer
tgcctttagaggctcaagtttt

SEQ ID NO: 21207 - DNA, 22 bp, Artificial Sequence
  Chr21_3 Reverse Primer
ttcagacagagggtcaacaaag

SEQ ID NO: 21208 - DNA, 20 bp, Artificial Sequence
  Chr21_3 Reverse Primer
tgcttttccaaatttccacc

SEQ ID NO: 21209 - DNA, 20 bp, Artificial Sequence
  Chr21_3 Reverse Primer
aacagttattggcggaatgc

SEQ ID NO: 21210 - DNA, 22 bp, Artificial Sequence
  Chr21_3 Reverse Primer
tcgtttcctgttttgtgacttg

SEQ ID NO: 21211 - DNA, 20 bp, Artificial Sequence
  Chr21_3 Reverse Primer
cccagcttatttggcatgat

SEQ ID NO: 21212 - DNA, 20 bp, Artificial Sequence
  Chr21_3 Reverse Primer
gtgtttcttggctccgtttc

SEQ ID NO: 21213 - DNA, 20 bp, Artificial Sequence
  Chr21_3 Reverse Primer
gaaaacaccatgatgccaaa

SEQ ID NO: 21214 - DNA, 22 bp, Artificial Sequence
  Chr21_3 Reverse Primer
tttatctcccaacagtgggatt

SEQ ID NO: 21215 - DNA, 20 bp, Artificial Sequence
  Chr21_3 Reverse Primer
acctgcactgtggaaatcct

SEQ ID NO: 21216 - DNA, 20 bp, Artificial Sequence
  Chr21_3 Reverse Primer
ttttctgggtttcttggctg

SEQ ID NO: 21217 - DNA, 20 bp, Artificial Sequence
  Chr21_3 Reverse Primer
tggggcaaagtcaggttaat

SEQ ID NO: 21218 - DNA, 22 bp, Artificial Sequence
  Chr21_3 Reverse Primer
tggaaccagagggtaagattca

SEQ ID NO: 21219 - DNA, 20 bp, Artificial Sequence
  Chr21_3 Reverse Primer
tgtgtggcatacaaccttcc

SEQ ID NO: 21220 - DNA, 21 bp, Artificial Sequence
  Chr21_3 Reverse Primer
cagaggagacaaccatgacct

SEQ ID NO: 21221 - DNA, 20 bp, Artificial Sequence
  Chr21_3 Reverse Primer
agcatgccttgtctttcagg

SEQ ID NO: 21222 - DNA, 20 bp, Artificial Sequence
  Chr21_3 Reverse Primer
ttggcgtgttgaatcatttt

SEQ ID NO: 21223 - DNA, 22 bp, Artificial Sequence
  Chr21_3 Reverse Primer
ttctttctcagggaaggagttt

SEQ ID NO: 21224 - DNA, 20 bp, Artificial Sequence
  Chr21_3 Reverse Primer
tgcaccatttagggaaacaa

SEQ ID NO: 21225 - DNA, 20 bp, Artificial Sequence
  Chr21_3 Reverse Primer
gggcattattgctcctggta

SEQ ID NO: 21226 - DNA, 22 bp, Artificial Sequence
  Chr21_3 Reverse Primer
tctggttcatcaaaaagtgcag

SEQ ID NO: 21227 - DNA, 23 bp, Artificial Sequence
  Chr21_3 Reverse Primer
tggtcaaaaatgaatgtcctaag

SEQ ID NO: 21228 - DNA, 20 bp, Artificial Sequence
  Chr21_3 Reverse Primer
atcgtgctcttttcctctgg

SEQ ID NO: 21229 - DNA, 20 bp, Artificial Sequence
  Chr21_3 Reverse Primer
tcttcagcacattgccactc

SEQ ID NO: 21230 - DNA, 20 bp, Artificial Sequence
  Chr21_3 Reverse Primer
tggataagggacactccacc

SEQ ID NO: 21231 - DNA, 20 bp, Artificial Sequence
  Chr21_3 Reverse Primer
tcacatcaaaaatcacccca

SEQ ID NO: 21232 - DNA, 22 bp, Artificial Sequence
  Chr21_3 Reverse Primer
tgacacccttgataacttttcg

SEQ ID NO: 21233 - DNA, 20 bp, Artificial Sequence
  Chr21_3 Reverse Primer
atgcaaggtttatgcaaggg

SEQ ID NO: 21234 - DNA, 20 bp, Artificial Sequence
  Chr21_3 Reverse Primer
catccctccagtgaccttgt

SEQ ID NO: 21235 - DNA, 20 bp, Artificial Sequence
  Chr21_3 Reverse Primer
cctgtagccttctcaggtcg

SEQ ID NO: 21236 - DNA, 20 bp, Artificial Sequence
  Chr21_3 Reverse Primer
aagtcatgtccctcagggtg

SEQ ID NO: 21237 - DNA, 20 bp, Artificial Sequence
  Chr21_3 Reverse Primer
gccctgttgcaccaactatt

SEQ ID NO: 21238 - DNA, 20 bp, Artificial Sequence
  Chr21_3 Reverse Primer
caggtgtgtgccactgtctc

SEQ ID NO: 21239 - DNA, 20 bp, Artificial Sequence
  Chr21_3 Reverse Primer
agttggaattgggtttcaca

SEQ ID NO: 21240 - DNA, 20 bp, Artificial Sequence
  Chr21_3 Reverse Primer
ttcactgtgtgcagaggagg

SEQ ID NO: 21241 - DNA, 20 bp, Artificial Sequence
  Chr21_3 Reverse Primer
gatggtgctgcagagtttga

SEQ ID NO: 21242 - DNA, 20 bp, Artificial Sequence
  Chr21_3 Reverse Primer
atcaaggcaagtggaggatg

SEQ ID NO: 21243 - DNA, 25 bp, Artificial Sequence
  Chr21_3 Reverse Primer
cccaaagggaacttaatgtatactg

SEQ ID NO: 21244 - DNA, 20 bp, Artificial Sequence
  Chr21_3 Reverse Primer
ggctgcttttcagactcctg

SEQ ID NO: 21245 - DNA, 23 bp, Artificial Sequence
  Chr21_3 Reverse Primer
ggactctgacaacatatggcttt

SEQ ID NO: 21246 - DNA, 23 bp, Artificial Sequence
  Chr21_3 Reverse Primer
gaatttggctaaaggtgaatttt

SEQ ID NO: 21247 - DNA, 20 bp, Artificial Sequence
  Chr21_3 Reverse Primer
ctggctgtttcctctggact

SEQ ID NO: 21248 - DNA, 21 bp, Artificial Sequence
  Chr21_3 Reverse Primer
gaatgcttagaaatggcatcg

SEQ ID NO: 21249 - DNA, 21 bp, Artificial Sequence
  Chr21_3 Reverse Primer
gcctcattaagttgcaagcag

SEQ ID NO: 21250 - DNA, 20 bp, Artificial Sequence
  Chr21_3 Reverse Primer
tcccacccacaatttgtttt

SEQ ID NO: 21251 - DNA, 20 bp, Artificial Sequence
  Chr21_3 Reverse Primer
ttttgaatggagggatcagg

SEQ ID NO: 21252 - DNA, 20 bp, Artificial Sequence
  Chr21_3 Reverse Primer
ggattcccagacacgaattg

SEQ ID NO: 21253 - DNA, 20 bp, Artificial Sequence
  Chr21_3 Reverse Primer
cctcaaatgcaggcagagat

SEQ ID NO: 21254 - DNA, 20 bp, Artificial Sequence
  Chr21_3 Reverse Primer
ggcatcattgctctttgtca

SEQ ID NO: 21255 - DNA, 20 bp, Artificial Sequence
  Chr21_3 Reverse Primer
atgaggttgcaaattggagg

SEQ ID NO: 21256 - DNA, 22 bp, Artificial Sequence
  Chr21_3 Reverse Primer
tgggattccagaagaataaagg

SEQ ID NO: 21257 - DNA, 18 bp, Artificial Sequence
  Chr21_3 Reverse Primer
acccagccttccatcgac

SEQ ID NO: 21258 - DNA, 20 bp, Artificial Sequence
  Chr21_3 Reverse Primer
tgcccttgattctttgaacc

SEQ ID NO: 21259 - DNA, 20 bp, Artificial Sequence
  Chr21_3 Reverse Primer
accgtcacgtcgttttgact

SEQ ID NO: 21260 - DNA, 23 bp, Artificial Sequence
  Chr21_3 Reverse Primer
gggtctgtctttaactggactca

SEQ ID NO: 21261 - DNA, 20 bp, Artificial Sequence
  Chr21_3 Reverse Primer
attttcatgcgtgtgttgga

SEQ ID NO: 21262 - DNA, 20 bp, Artificial Sequence
  Chr21_3 Reverse Primer
aaaggcttgtaggctggaca

SEQ ID NO: 21263 - DNA, 20 bp, Artificial Sequence
  Chr21_3 Reverse Primer
gtttggcatcccaactttgt

SEQ ID NO: 21264 - DNA, 20 bp, Artificial Sequence
  Chr21_3 Reverse Primer
aggatcgtagtgtgggggat

SEQ ID NO: 21265 - DNA, 20 bp, Artificial Sequence
  Chr21_3 Reverse Primer
ctgcaagacaacacctgcat

SEQ ID NO: 21266 - DNA, 21 bp, Artificial Sequence
  Chr21_3 Reverse Primer
tgcagactgaacacatgtcaa

SEQ ID NO: 21267 - DNA, 20 bp, Artificial Sequence
  Chr21_3 Reverse Primer
acacctgtggagaagaaccg

SEQ ID NO: 21268 - DNA, 20 bp, Artificial Sequence
  Chr21_3 Reverse Primer
cctgtggtgctctcttcctc

SEQ ID NO: 21269 - DNA, 20 bp, Artificial Sequence
  Chr21_4 Forward Primer
tagaaggcccaatcaacacc

SEQ ID NO: 21270 - DNA, 22 bp, Artificial Sequence
  Chr21_4 Forward Primer
ccataatcttgatgttcatcgc

SEQ ID NO: 21271 - DNA, 20 bp, Artificial Sequence
  Chr21_4 Forward Primer
attccatgctgctcctgagt

SEQ ID NO: 21272 - DNA, 20 bp, Artificial Sequence
  Chr21_4 Forward Primer
cttcccatggaaacctcctt

SEQ ID NO: 21273 - DNA, 21 bp, Artificial Sequence
  Chr21_4 Forward Primer
tgcaccttacatgaccacaga

SEQ ID NO: 21274 - DNA, 20 bp, Artificial Sequence
  Chr21_4 Forward Primer
aacccttagaagtggggctg

SEQ ID NO: 21275 - DNA, 22 bp, Artificial Sequence
  Chr21_4 Forward Primer
catgatggcttctgacattctc

SEQ ID NO: 21276 - DNA, 20 bp, Artificial Sequence
  Chr21_4 Forward Primer
ctgaagtaatggaatgcccg

SEQ ID NO: 21277 - DNA, 20 bp, Artificial Sequence
  Chr21_4 Forward Primer
tctcttgggggctaggtttt

SEQ ID NO: 21278 - DNA, 20 bp, Artificial Sequence
  Chr21_4 Forward Primer
gggctgaatctggtatggaa

SEQ ID NO: 21279 - DNA, 21 bp, Artificial Sequence
  Chr21_4 Forward Primer
gagcagaggtatccagaagca

SEQ ID NO: 21280 - DNA, 20 bp, Artificial Sequence
  Chr21_4 Forward Primer
cctggtagacagggcttgtg

SEQ ID NO: 21281 - DNA, 22 bp, Artificial Sequence
  Chr21_4 Forward Primer
ttgaggatagggtgtttgttca

SEQ ID NO: 21282 - DNA, 21 bp, Artificial Sequence
  Chr21_4 Forward Primer
tggaatccaagcagtttgact

SEQ ID NO: 21283 - DNA, 20 bp, Artificial Sequence
  Chr21_4 Forward Primer
aaaatgctggaaaggggttt

SEQ ID NO: 21284 - DNA, 20 bp, Artificial Sequence
  Chr21_4 Forward Primer
gcaccacaacttgcagagaa

SEQ ID NO: 21285 - DNA, 20 bp, Artificial Sequence
  Chr21_4 Forward Primer
gtgagcaaacagcaaggcta

SEQ ID NO: 21286 - DNA, 20 bp, Artificial Sequence
  Chr21_4 Forward Primer
gccttcagaaagttcatgcc

SEQ ID NO: 21287 - DNA, 20 bp, Artificial Sequence
  Chr21_4 Forward Primer
gcactcagacttcctgggtt

SEQ ID NO: 21288 - DNA, 20 bp, Artificial Sequence
  Chr21_4 Forward Primer
tgcctcaagtcttacagggg

SEQ ID NO: 21289 - DNA, 20 bp, Artificial Sequence
  Chr21_4 Forward Primer
ttgcatggtttgtggaagtt

SEQ ID NO: 21290 - DNA, 27 bp, Artificial Sequence
  Chr21_4 Forward Primer
cctatggaaaagataaataaaacatga

SEQ ID NO: 21291 - DNA, 20 bp, Artificial Sequence
  Chr21_4 Forward Primer
tatgtcgcttccatgtcctg

SEQ ID NO: 21292 - DNA, 20 bp, Artificial Sequence
  Chr21_4 Forward Primer
acctgatgagccaactgcat

SEQ ID NO: 21293 - DNA, 20 bp, Artificial Sequence
  Chr21_4 Forward Primer
gtggctgtagcgatcacaaa

SEQ ID NO: 21294 - DNA, 22 bp, Artificial Sequence
  Chr21_4 Forward Primer
gaggtttctgtgaccaatctga

SEQ ID NO: 21295 - DNA, 20 bp, Artificial Sequence
  Chr21_4 Forward Primer
ttcatcaggaaattccccct

SEQ ID NO: 21296 - DNA, 21 bp, Artificial Sequence
  Chr21_4 Forward Primer
ggccagcacttaaacctaatg

SEQ ID NO: 21297 - DNA, 20 bp, Artificial Sequence
  Chr21_4 Forward Primer
ctacaggggctacgggctat

SEQ ID NO: 21298 - DNA, 25 bp, Artificial Sequence
  Chr21_4 Forward Primer
ttttgcttccattgtttagtttctt

SEQ ID NO: 21299 - DNA, 20 bp, Artificial Sequence
  Chr21_4 Forward Primer
gaaacattgcagaggacggt

SEQ ID NO: 21300 - DNA, 20 bp, Artificial Sequence
  Chr21_4 Forward Primer
aacattgtgccactgggttt

SEQ ID NO: 21301 - DNA, 21 bp, Artificial Sequence
  Chr21_4 Forward Primer
cgttgcacagcagaatatgag

SEQ ID NO: 21302 - DNA, 20 bp, Artificial Sequence
  Chr21_4 Forward Primer
ggtgacggactccgaaagta

SEQ ID NO: 21303 - DNA, 20 bp, Artificial Sequence
  Chr21_4 Forward Primer
taccctggtcagagcatgtg

SEQ ID NO: 21304 - DNA, 23 bp, Artificial Sequence
  Chr21_4 Forward Primer
ccacaaaatttcaagaaatagcc

SEQ ID NO: 21305 - DNA, 20 bp, Artificial Sequence
  Chr21_4 Forward Primer
tccctcttgcatcttttgct

SEQ ID NO: 21306 - DNA, 24 bp, Artificial Sequence
  Chr21_4 Forward Primer
ccgctttctagttatcttttcctg

SEQ ID NO: 21307 - DNA, 20 bp, Artificial Sequence
  Chr21_4 Forward Primer
aatgcggtgtttctctgacc

SEQ ID NO: 21308 - DNA, 21 bp, Artificial Sequence
  Chr21_4 Forward Primer
agccttcctctttgatgtctg

SEQ ID NO: 21309 - DNA, 21 bp, Artificial Sequence
  Chr21_4 Forward Primer
tgagacacaaatgcgaaactt

SEQ ID NO: 21310 - DNA, 25 bp, Artificial Sequence
  Chr21_4 Forward Primer
ggatcaaaagtagatttggatcatt

SEQ ID NO: 21311 - DNA, 20 bp, Artificial Sequence
  Chr21_4 Forward Primer
tcagccccatggaaactatc

SEQ ID NO: 21312 - DNA, 20 bp, Artificial Sequence
  Chr21_4 Forward Primer
ggccaaccttcataaaagca

SEQ ID NO: 21313 - DNA, 25 bp, Artificial Sequence
  Chr21_4 Forward Primer
tgaaactacagaatattttgcctca

SEQ ID NO: 21314 - DNA, 27 bp, Artificial Sequence
  Chr21_4 Forward Primer
aaaatcctaaattcttcatcactatgc

SEQ ID NO: 21315 - DNA, 24 bp, Artificial Sequence
  Chr21_4 Forward Primer
tcaaaagaaaaggaagtttttgaa

SEQ ID NO: 21316 - DNA, 20 bp, Artificial Sequence
  Chr21_4 Forward Primer
cacacacacacacacacacg

SEQ ID NO: 21317 - DNA, 20 bp, Artificial Sequence
  Chr21_4 Forward Primer
ttccaattctgtgtgcctca

SEQ ID NO: 21318 - DNA, 20 bp, Artificial Sequence
  Chr21_4 Forward Primer
tgccatggttgttttctcct

SEQ ID NO: 21319 - DNA, 23 bp, Artificial Sequence
  Chr21_4 Forward Primer
tgctgtgaaagatatgaaccaaa

SEQ ID NO: 21320 - DNA, 20 bp, Artificial Sequence
  Chr21_4 Forward Primer
catgccatgactttgccata

SEQ ID NO: 21321 - DNA, 20 bp, Artificial Sequence
  Chr21_4 Forward Primer
tgtcaccatttgcttgctct

SEQ ID NO: 21322 - DNA, 22 bp, Artificial Sequence
  Chr21_4 Forward Primer
tttcatgaacaaaacagaacca

SEQ ID NO: 21323 - DNA, 20 bp, Artificial Sequence
  Chr21_4 Forward Primer
tgaagaggccctcaaactca

SEQ ID NO: 21324 - DNA, 23 bp, Artificial Sequence
  Chr21_4 Forward Primer
ctagaacattggccatcataacc

SEQ ID NO: 21325 - DNA, 20 bp, Artificial Sequence
  Chr21_4 Forward Primer
attctttttgcctcccatcc

SEQ ID NO: 21326 - DNA, 24 bp, Artificial Sequence
  Chr21_4 Forward Primer
aaaaagacaggatgaaggaaataa

SEQ ID NO: 21327 - DNA, 20 bp, Artificial Sequence
  Chr21_4 Forward Primer
ttcaatgaccagcatgcaat

SEQ ID NO: 21328 - DNA, 20 bp, Artificial Sequence
  Chr21_4 Forward Primer
ctaattcccaaagtctggcg

SEQ ID NO: 21329 - DNA, 22 bp, Artificial Sequence
  Chr21_4 Forward Primer
gaaaagcaaagctattccctga

SEQ ID NO: 21330 - DNA, 20 bp, Artificial Sequence
  Chr21_4 Forward Primer
cccagtccatggagagtgtt

SEQ ID NO: 21331 - DNA, 20 bp, Artificial Sequence
  Chr21_4 Forward Primer
agaagccatgtgtgccattt

SEQ ID NO: 21332 - DNA, 20 bp, Artificial Sequence
  Chr21_4 Forward Primer
ggcatgcaaattcagttgtg

SEQ ID NO: 21333 - DNA, 22 bp, Artificial Sequence
  Chr21_4 Forward Primer
ccaagcacactctaatctccaa

SEQ ID NO: 21334 - DNA, 25 bp, Artificial Sequence
  Chr21_4 Forward Primer
taattctgactattcttgtgggcat

SEQ ID NO: 21335 - DNA, 20 bp, Artificial Sequence
  Chr21_4 Forward Primer
tctgccaacatgtggtttgt

SEQ ID NO: 21336 - DNA, 20 bp, Artificial Sequence
  Chr21_4 Forward Primer
tagaccaggcgacagctttt

SEQ ID NO: 21337 - DNA, 20 bp, Artificial Sequence
  Chr21_4 Forward Primer
gccagagtttttcaaatgcg

SEQ ID NO: 21338 - DNA, 20 bp, Artificial Sequence
  Chr21_4 Forward Primer
tggggaagtagaatgcctga

SEQ ID NO: 21339 - DNA, 20 bp, Artificial Sequence
  Chr21_4 Forward Primer
ataccaacacgaaaaggccc

SEQ ID NO: 21340 - DNA, 20 bp, Artificial Sequence
  Chr21_4 Forward Primer
tcttaccattaaaggggcca

SEQ ID NO: 21341 - DNA, 22 bp, Artificial Sequence
  Chr21_4 Forward Primer
tcatctgtataccctcctttgc

SEQ ID NO: 21342 - DNA, 20 bp, Artificial Sequence
  Chr21_4 Forward Primer
tcctttgtccgtcatcttcc

SEQ ID NO: 21343 - DNA, 20 bp, Artificial Sequence
  Chr21_4 Forward Primer
gactttgcacaccagcttca

SEQ ID NO: 21344 - DNA, 20 bp, Artificial Sequence
  Chr21_4 Forward Primer
acctgtctcttggcttcgac

SEQ ID NO: 21345 - DNA, 21 bp, Artificial Sequence
  Chr21_4 Forward Primer
cagtgagtccttttgaagcca

SEQ ID NO: 21346 - DNA, 23 bp, Artificial Sequence
  Chr21_4 Forward Primer
tgtgataattttccacaagacca

SEQ ID NO: 21347 - DNA, 23 bp, Artificial Sequence
  Chr21_4 Forward Primer
aagtcgattagacccaaagttga

SEQ ID NO: 21348 - DNA, 20 bp, Artificial Sequence
  Chr21_4 Forward Primer
gccacaagtgctttttctca

SEQ ID NO: 21349 - DNA, 21 bp, Artificial Sequence
  Chr21_4 Forward Primer
cattgcataaacaaacccaag

SEQ ID NO: 21350 - DNA, 20 bp, Artificial Sequence
  Chr21_4 Forward Primer
cagatggcattcagatttgg

SEQ ID NO: 21351 - DNA, 23 bp, Artificial Sequence
  Chr21_4 Forward Primer
aaagaattgctttctggtgaatg

SEQ ID NO: 21352 - DNA, 20 bp, Artificial Sequence
  Chr21_4 Forward Primer
tgaatgccacagaggaactg

SEQ ID NO: 21353 - DNA, 21 bp, Artificial Sequence
  Chr21_4 Forward Primer
ccaggagaaaagatggagaca

SEQ ID NO: 21354 - DNA, 22 bp, Artificial Sequence
  Chr21_4 Forward Primer
cacgaggttaggagttaaaggc

SEQ ID NO: 21355 - DNA, 22 bp, Artificial Sequence
  Chr21_4 Forward Primer
caggacacacataatctccacc

SEQ ID NO: 21356 - DNA, 20 bp, Artificial Sequence
  Chr21_4 Forward Primer
gtccacatggaagccatctt

SEQ ID NO: 21357 - DNA, 24 bp, Artificial Sequence
  Chr21_4 Forward Primer
gttagaagcacaattccaagtcaa

SEQ ID NO: 21358 - DNA, 21 bp, Artificial Sequence
  Chr21_4 Forward Primer
catggtgaattctagcaacgg

SEQ ID NO: 21359 - DNA, 24 bp, Artificial Sequence
  Chr21_4 Forward Primer
aaggacatagaatacacaatgcaa

SEQ ID NO: 21360 - DNA, 20 bp, Artificial Sequence
  Chr21_4 Forward Primer
cagtgaaggcactggctatg

SEQ ID NO: 21361 - DNA, 22 bp, Artificial Sequence
  Chr21_4 Forward Primer
catgcattagtgcaattttcaa

SEQ ID NO: 21362 - DNA, 20 bp, Artificial Sequence
  Chr21_4 Forward Primer
cagaggccaagtgaccaaat

SEQ ID NO: 21363 - DNA, 23 bp, Artificial Sequence
  Chr21_4 Forward Primer
tgtctctccttcaaactcaatct

SEQ ID NO: 21364 - DNA, 20 bp, Artificial Sequence
  Chr21_4 Forward Primer
tgagcgggggatatatttga

SEQ ID NO: 21365 - DNA, 20 bp, Artificial Sequence
  Chr21_4 Reverse Primer
ctgcagctcacttagcatgg

SEQ ID NO: 21366 - DNA, 20 bp, Artificial Sequence
  Chr21_4 Reverse Primer
tccaagcaaatgatcaaaca

SEQ ID NO: 21367 - DNA, 21 bp, Artificial Sequence
  Chr21_4 Reverse Primer
tgagatgtgatgtgacggagt

SEQ ID NO: 21368 - DNA, 20 bp, Artificial Sequence
  Chr21_4 Reverse Primer
gggacctgtgttgatcgttt

SEQ ID NO: 21369 - DNA, 20 bp, Artificial Sequence
  Chr21_4 Reverse Primer
catgtggctttttctaccca

SEQ ID NO: 21370 - DNA, 20 bp, Artificial Sequence
  Chr21_4 Reverse Primer
ggatctcagttggggtcaga

SEQ ID NO: 21371 - DNA, 22 bp, Artificial Sequence
  Chr21_4 Reverse Primer
aaaacatctaaagttcctggcg

SEQ ID NO: 21372 - DNA, 20 bp, Artificial Sequence
  Chr21_4 Reverse Primer
aaattatgccccaagccttt

SEQ ID NO: 21373 - DNA, 20 bp, Artificial Sequence
  Chr21_4 Reverse Primer
ttcatttcctgagggtttgg

SEQ ID NO: 21374 - DNA, 20 bp, Artificial Sequence
  Chr21_4 Reverse Primer
agacatcgctactgggagca

SEQ ID NO: 21375 - DNA, 20 bp, Artificial Sequence
  Chr21_4 Reverse Primer
gactgggttgagaagtggga

SEQ ID NO: 21376 - DNA, 24 bp, Artificial Sequence
  Chr21_4 Reverse Primer
ttcccattttaaattgtatgcctt

SEQ ID NO: 21377 - DNA, 20 bp, Artificial Sequence
  Chr21_4 Reverse Primer
aagaatggccaggcagaata

SEQ ID NO: 21378 - DNA, 21 bp, Artificial Sequence
  Chr21_4 Reverse Primer
ttccccttaaccttgacattt

SEQ ID NO: 21379 - DNA, 21 bp, Artificial Sequence
  Chr21_4 Reverse Primer
aactgggcaccctgtattttt

SEQ ID NO: 21380 - DNA, 20 bp, Artificial Sequence
  Chr21_4 Reverse Primer
tctgccttttggctggtaac

SEQ ID NO: 21381 - DNA, 20 bp, Artificial Sequence
  Chr21_4 Reverse Primer
cgcatacaaaacctcaaagc

SEQ ID NO: 21382 - DNA, 20 bp, Artificial Sequence
  Chr21_4 Reverse Primer
aaggaatacttgcaccccct

SEQ ID NO: 21383 - DNA, 20 bp, Artificial Sequence
  Chr21_4 Reverse Primer
tggagtttccccttgtagga

SEQ ID NO: 21384 - DNA, 20 bp, Artificial Sequence
  Chr21_4 Reverse Primer
gcccctaaagaaggtccaat

SEQ ID NO: 21385 - DNA, 20 bp, Artificial Sequence
  Chr21_4 Reverse Primer
aatgtgctggacgctctttt

SEQ ID NO: 21386 - DNA, 20 bp, Artificial Sequence
  Chr21_4 Reverse Primer
gggcctagaataatgcctgg

SEQ ID NO: 21387 - DNA, 20 bp, Artificial Sequence
  Chr21_4 Reverse Primer
gagatgccttccagattcca

SEQ ID NO: 21388 - DNA, 20 bp, Artificial Sequence
  Chr21_4 Reverse Primer
tccaaaactcaaaacctgcc

SEQ ID NO: 21389 - DNA, 20 bp, Artificial Sequence
  Chr21_4 Reverse Primer
agacatcactgctggcctct

SEQ ID NO: 21390 - DNA, 23 bp, Artificial Sequence
  Chr21_4 Reverse Primer
tgtgtacctagtcatgcttgtgc

SEQ ID NO: 21391 - DNA, 21 bp, Artificial Sequence
  Chr21_4 Reverse Primer
aaagaattggaagctgggaac

SEQ ID NO: 21392 - DNA, 20 bp, Artificial Sequence
  Chr21_4 Reverse Primer
tggtgggtgcttttagagaa

SEQ ID NO: 21393 - DNA, 20 bp, Artificial Sequence
  Chr21_4 Reverse Primer
acccttcagcagctaccctt

SEQ ID NO: 21394 - DNA, 21 bp, Artificial Sequence
  Chr21_4 Reverse Primer
gaagcctgtttcaccagtttg

SEQ ID NO: 21395 - DNA, 20 bp, Artificial Sequence
  Chr21_4 Reverse Primer
agaaaccttctgggctgtca

SEQ ID NO: 21396 - DNA, 20 bp, Artificial Sequence
  Chr21_4 Reverse Primer
tcttggtacccctgttctgg

SEQ ID NO: 21397 - DNA, 20 bp, Artificial Sequence
  Chr21_4 Reverse Primer
tgaggcagtgagatctgtgg

SEQ ID NO: 21398 - DNA, 21 bp, Artificial Sequence
  Chr21_4 Reverse Primer
ggatacggattctctggcttt

SEQ ID NO: 21399 - DNA, 20 bp, Artificial Sequence
  Chr21_4 Reverse Primer
tttgaagaagcagcaatccc

SEQ ID NO: 21400 - DNA, 20 bp, Artificial Sequence
  Chr21_4 Reverse Primer
tgtgcaaagcccaaaataaa

SEQ ID NO: 21401 - DNA, 20 bp, Artificial Sequence
  Chr21_4 Reverse Primer
aacatgggcacagaataggc

SEQ ID NO: 21402 - DNA, 22 bp, Artificial Sequence
  Chr21_4 Reverse Primer
tcactggtcaactctccctaca

SEQ ID NO: 21403 - DNA, 22 bp, Artificial Sequence
  Chr21_4 Reverse Primer
tgctactctgacagcaggaatc

SEQ ID NO: 21404 - DNA, 25 bp, Artificial Sequence
  Chr21_4 Reverse Primer
caaacaaaatagcctttaatcatgg

SEQ ID NO: 21405 - DNA, 22 bp, Artificial Sequence
  Chr21_4 Reverse Primer
ccctcaaaggaaatttcagaga

SEQ ID NO: 21406 - DNA, 27 bp, Artificial Sequence
  Chr21_4 Reverse Primer
aatcaatcttataatttcatgctgttt

SEQ ID NO: 21407 - DNA, 20 bp, Artificial Sequence
  Chr21_4 Reverse Primer
aaaacaaaacaaagcgccat

SEQ ID NO: 21408 - DNA, 20 bp, Artificial Sequence
  Chr21_4 Reverse Primer
tggaggcacagaaattcaga

SEQ ID NO: 21409 - DNA, 20 bp, Artificial Sequence
  Chr21_4 Reverse Primer
tgcatgtacaacaagcctga

SEQ ID NO: 21410 - DNA, 20 bp, Artificial Sequence
  Chr21_4 Reverse Primer
gccttaatttctcaacgcaa

SEQ ID NO: 21411 - DNA, 20 bp, Artificial Sequence
  Chr21_4 Reverse Primer
tgctgttcaggctggtgtaa

SEQ ID NO: 21412 - DNA, 20 bp, Artificial Sequence
  Chr21_4 Reverse Primer
tgggaatgaatgcagcataa

SEQ ID NO: 21413 - DNA, 20 bp, Artificial Sequence
  Chr21_4 Reverse Primer
tcctcacatccttgcttcct

SEQ ID NO: 21414 - DNA, 20 bp, Artificial Sequence
  Chr21_4 Reverse Primer
atgcatcggaaatagcaatg

SEQ ID NO: 21415 - DNA, 20 bp, Artificial Sequence
  Chr21_4 Reverse Primer
tcctggaaaaatatccccaa

SEQ ID NO: 21416 - DNA, 24 bp, Artificial Sequence
  Chr21_4 Reverse Primer
caccctatcatactcttctgtcca

SEQ ID NO: 21417 - DNA, 25 bp, Artificial Sequence
  Chr21_4 Reverse Primer
tgatatttttcaacattttcctttt

SEQ ID NO: 21418 - DNA, 21 bp, Artificial Sequence
  Chr21_4 Reverse Primer
ggacaacaaagatcatgctgg

SEQ ID NO: 21419 - DNA, 20 bp, Artificial Sequence
  Chr21_4 Reverse Primer
ggaaagccagagatgaagca

SEQ ID NO: 21420 - DNA, 20 bp, Artificial Sequence
  Chr21_4 Reverse Primer
tatgccagtaagggagtcgg

SEQ ID NO: 21421 - DNA, 20 bp, Artificial Sequence
  Chr21_4 Reverse Primer
ctttggcgatggcatctatt

SEQ ID NO: 21422 - DNA, 27 bp, Artificial Sequence
  Chr21_4 Reverse Primer
aaaattgcttataaactcatcaaaagc

SEQ ID NO: 21423 - DNA, 21 bp, Artificial Sequence
  Chr21_4 Reverse Primer
cagcaacaaaaagcaaatgaa

SEQ ID NO: 21424 - DNA, 24 bp, Artificial Sequence
  Chr21_4 Reverse Primer
caacaaaattcacatcacatacga

SEQ ID NO: 21425 - DNA, 22 bp, Artificial Sequence
  Chr21_4 Reverse Primer
tggcattttctcacaatacagg

SEQ ID NO: 21426 - DNA, 24 bp, Artificial Sequence
  Chr21_4 Reverse Primer
ttttgatgaatcttgaacctctta

SEQ ID NO: 21427 - DNA, 23 bp, Artificial Sequence
  Chr21_4 Reverse Primer
caaatattgagtcaaacaagggc

SEQ ID NO: 21428 - DNA, 20 bp, Artificial Sequence
  Chr21_4 Reverse Primer
agggtgcaagtcctcagttg

SEQ ID NO: 21429 - DNA, 25 bp, Artificial Sequence
  Chr21_4 Reverse Primer
caagcattatcaaatatgtggaaca

SEQ ID NO: 21430 - DNA, 20 bp, Artificial Sequence
  Chr21_4 Reverse Primer
agctcccacaaatcagtgct

SEQ ID NO: 21431 - DNA, 22 bp, Artificial Sequence
  Chr21_4 Reverse Primer
tgcttcataaaaatggaacagg

SEQ ID NO: 21432 - DNA, 20 bp, Artificial Sequence
  Chr21_4 Reverse Primer
aagtggtcaatggcatcaca

SEQ ID NO: 21433 - DNA, 20 bp, Artificial Sequence
  Chr21_4 Reverse Primer
tcgaaggctctgttcatgtg

SEQ ID NO: 21434 - DNA, 20 bp, Artificial Sequence
  Chr21_4 Reverse Primer
gcaaattcaaaaatgccagg

SEQ ID NO: 21435 - DNA, 20 bp, Artificial Sequence
  Chr21_4 Reverse Primer
ctggtccattgtggtgtgac

SEQ ID NO: 21436 - DNA, 21 bp, Artificial Sequence
  Chr21_4 Reverse Primer
ctttttctttggaacactgcg

SEQ ID NO: 21437 - DNA, 20 bp, Artificial Sequence
  Chr21_4 Reverse Primer
gttgagcatttggaatgtgc

SEQ ID NO: 21438 - DNA, 20 bp, Artificial Sequence
  Chr21_4 Reverse Primer
ttttgagtcctttggcgatt

SEQ ID NO: 21439 - DNA, 20 bp, Artificial Sequence
  Chr21_4 Reverse Primer
caaaacagaggcagatgcaa

SEQ ID NO: 21440 - DNA, 20 bp, Artificial Sequence
  Chr21_4 Reverse Primer
gcacagattgtggttgctgt

SEQ ID NO: 21441 - DNA, 21 bp, Artificial Sequence
  Chr21_4 Reverse Primer
tttggctattgaggttttcca

SEQ ID NO: 21442 - DNA, 24 bp, Artificial Sequence
  Chr21_4 Reverse Primer
caatctctttcagcataaaaccaa

SEQ ID NO: 21443 - DNA, 24 bp, Artificial Sequence
  Chr21_4 Reverse Primer
tctgagttaaacgaagtctttgga

SEQ ID NO: 21444 - DNA, 20 bp, Artificial Sequence
  Chr21_4 Reverse Primer
atgctgtaccttcacagggg

SEQ ID NO: 21445 - DNA, 23 bp, Artificial Sequence
  Chr21_4 Reverse Primer
ttttggagcagagtatatggaga

SEQ ID NO: 21446 - DNA, 20 bp, Artificial Sequence
  Chr21_4 Reverse Primer
agtgagagctggaccaaacg

SEQ ID NO: 21447 - DNA, 22 bp, Artificial Sequence
  Chr21_4 Reverse Primer
tcatcatcatcctcatgacact

SEQ ID NO: 21448 - DNA, 22 bp, Artificial Sequence
  Chr21_4 Reverse Primer
tgtttcatggctttcttgattc

SEQ ID NO: 21449 - DNA, 21 bp, Artificial Sequence
  Chr21_4 Reverse Primer
tcctgttagggaagacatgga

SEQ ID NO: 21450 - DNA, 22 bp, Artificial Sequence
  Chr21_4 Reverse Primer
aattccatgcatgctaaacaaa

SEQ ID NO: 21451 - DNA, 21 bp, Artificial Sequence
  Chr21_4 Reverse Primer
cagttttgaaagaggcatgga

SEQ ID NO: 21452 - DNA, 20 bp, Artificial Sequence
  Chr21_4 Reverse Primer
ttaatgctgcgtggtgatct

SEQ ID NO: 21453 - DNA, 23 bp, Artificial Sequence
  Chr21_4 Reverse Primer
ttttgaggaatttgttgactcct

SEQ ID NO: 21454 - DNA, 24 bp, Artificial Sequence
  Chr21_4 Reverse Primer
tgaatttcttcaagcattaatttg

SEQ ID NO: 21455 - DNA, 20 bp, Artificial Sequence
  Chr21_4 Reverse Primer
tttcagcaccatttgatgga

SEQ ID NO: 21456 - DNA, 20 bp, Artificial Sequence
  Chr21_4 Reverse Primer
tggctatttgcacatcttgc

SEQ ID NO: 21457 - DNA, 20 bp, Artificial Sequence
  Chr21_4 Reverse Primer
cacttttggggactgctttc

SEQ ID NO: 21458 - DNA, 20 bp, Artificial Sequence
  Chr21_4 Reverse Primer
gtctccttctcccggatttc

SEQ ID NO: 21459 - DNA, 21 bp, Artificial Sequence
  Chr21_4 Reverse Primer
ttttacattgggaaatgcctc

SEQ ID NO: 21460 - DNA, 20 bp, Artificial Sequence
  Chr21_4 Reverse Primer
atgtctgtggatgtggcaga

SEQ ID NO: 21461 - DNA, 20 bp, Artificial Sequence
  Chr21_5 Forward Primer
tctgactctgtcctcccctg

SEQ ID NO: 21462 - DNA, 20 bp, Artificial Sequence
  Chr21_5 Forward Primer
tatccaactgctgggacaca

SEQ ID NO: 21463 - DNA, 20 bp, Artificial Sequence
  Chr21_5 Forward Primer
tcctttcaaatgtgctgtgc

SEQ ID NO: 21464 - DNA, 23 bp, Artificial Sequence
  Chr21_5 Forward Primer
ccatccactactgatggagattt

SEQ ID NO: 21465 - DNA, 20 bp, Artificial Sequence
  Chr21_5 Forward Primer
gctttctttagggccagtcc

SEQ ID NO: 21466 - DNA, 20 bp, Artificial Sequence
  Chr21_5 Forward Primer
caagcccaggaagtcacatt

SEQ ID NO: 21467 - DNA, 20 bp, Artificial Sequence
  Chr21_5 Forward Primer
agaggtccactcaaggatgc

SEQ ID NO: 21468 - DNA, 20 bp, Artificial Sequence
  Chr21_5 Forward Primer
ttcacgtgcatggataatgg

SEQ ID NO: 21469 - DNA, 20 bp, Artificial Sequence
  Chr21_5 Forward Primer
gtatgcgacgcagaatgcta

SEQ ID NO: 21470 - DNA, 20 bp, Artificial Sequence
  Chr21_5 Forward Primer
ccatctatgaggggccatta

SEQ ID NO: 21471 - DNA, 21 bp, Artificial Sequence
  Chr21_5 Forward Primer
gggggaaaagtaatccgtaca

SEQ ID NO: 21472 - DNA, 20 bp, Artificial Sequence
  Chr21_5 Forward Primer
gtcaagcaaggcctgagaac

SEQ ID NO: 21473 - DNA, 20 bp, Artificial Sequence
  Chr21_5 Forward Primer
atacctgggcatttcttccc

SEQ ID NO: 21474 - DNA, 20 bp, Artificial Sequence
  Chr21_5 Forward Primer
gagagaatgaaaggaggggc

SEQ ID NO: 21475 - DNA, 20 bp, Artificial Sequence
  Chr21_5 Forward Primer
tgcaggtgctagatcaggtg

SEQ ID NO: 21476 - DNA, 20 bp, Artificial Sequence
  Chr21_5 Forward Primer
aagggcagatgtcttctgga

SEQ ID NO: 21477 - DNA, 23 bp, Artificial Sequence
  Chr21_5 Forward Primer
ggagatggttgtttagtggtgtg

SEQ ID NO: 21478 - DNA, 20 bp, Artificial Sequence
  Chr21_5 Forward Primer
tttgctgacctctggtctga

SEQ ID NO: 21479 - DNA, 20 bp, Artificial Sequence
  Chr21_5 Forward Primer
cttggatttaaagggcggat

SEQ ID NO: 21480 - DNA, 20 bp, Artificial Sequence
  Chr21_5 Forward Primer
ggaataagggccaagtgtca

SEQ ID NO: 21481 - DNA, 20 bp, Artificial Sequence
  Chr21_5 Forward Primer
tgggttcttcaactccaagc

SEQ ID NO: 21482 - DNA, 20 bp, Artificial Sequence
  Chr21_5 Forward Primer
tgaaggcagcatgatgaaag

SEQ ID NO: 21483 - DNA, 21 bp, Artificial Sequence
  Chr21_5 Forward Primer
tcagtgccaaatgagtcatca

SEQ ID NO: 21484 - DNA, 20 bp, Artificial Sequence
  Chr21_5 Forward Primer
tacgaggcactgttgtctcc

SEQ ID NO: 21485 - DNA, 20 bp, Artificial Sequence
  Chr21_5 Forward Primer
agcaaattaaaaatggggca

SEQ ID NO: 21486 - DNA, 21 bp, Artificial Sequence
  Chr21_5 Forward Primer
tttgaaaaccttgcatccttg

SEQ ID NO: 21487 - DNA, 20 bp, Artificial Sequence
  Chr21_5 Forward Primer
caccctgagaaagcaaggag

SEQ ID NO: 21488 - DNA, 20 bp, Artificial Sequence
  Chr21_5 Forward Primer
accctttgaaacgtgaccag

SEQ ID NO: 21489 - DNA, 20 bp, Artificial Sequence
  Chr21_5 Forward Primer
gcaatggttttaagcctgga

SEQ ID NO: 21490 - DNA, 22 bp, Artificial Sequence
  Chr21_5 Forward Primer
ctgtcaatctttccatagcctg

SEQ ID NO: 21491 - DNA, 20 bp, Artificial Sequence
  Chr21_5 Forward Primer
tcagttgcagcctttttcaa

SEQ ID NO: 21492 - DNA, 20 bp, Artificial Sequence
  Chr21_5 Forward Primer
tggaaagaacgaaaaccagc

SEQ ID NO: 21493 - DNA, 20 bp, Artificial Sequence
  Chr21_5 Forward Primer
tggcttatgacatgcgagag

SEQ ID NO: 21494 - DNA, 23 bp, Artificial Sequence
  Chr21_5 Forward Primer
gcaagacaaaaataaatcagtgc

SEQ ID NO: 21495 - DNA, 20 bp, Artificial Sequence
  Chr21_5 Forward Primer
tctcccatgaggcttttagg

SEQ ID NO: 21496 - DNA, 20 bp, Artificial Sequence
  Chr21_5 Forward Primer
caagcttgtgctgggtaggt

SEQ ID NO: 21497 - DNA, 20 bp, Artificial Sequence
  Chr21_5 Forward Primer
tttccaaggcggttctgtag

SEQ ID NO: 21498 - DNA, 22 bp, Artificial Sequence
  Chr21_5 Forward Primer
tgtgtttgtgtgcatgagtaga

SEQ ID NO: 21499 - DNA, 20 bp, Artificial Sequence
  Chr21_5 Forward Primer
gcatcaacagagcagatgga

SEQ ID NO: 21500 - DNA, 20 bp, Artificial Sequence
  Chr21_5 Forward Primer
tatctgtcctccacccaacc

SEQ ID NO: 21501 - DNA, 20 bp, Artificial Sequence
  Chr21_5 Forward Primer
ctgcccatgtccaagacttt

SEQ ID NO: 21502 - DNA, 20 bp, Artificial Sequence
  Chr21_5 Forward Primer
aggaagggggaagattttga

SEQ ID NO: 21503 - DNA, 20 bp, Artificial Sequence
  Chr21_5 Forward Primer
cctctttctgtctcccacca

SEQ ID NO: 21504 - DNA, 22 bp, Artificial Sequence
  Chr21_5 Forward Primer
ttgggagaaacttcttcagctt

SEQ ID NO: 21505 - DNA, 20 bp, Artificial Sequence
  Chr21_5 Forward Primer
gccagtgggatgtgactttt

SEQ ID NO: 21506 - DNA, 20 bp, Artificial Sequence
  Chr21_5 Forward Primer
ttagccatcctttcctccct

SEQ ID NO: 21507 - DNA, 20 bp, Artificial Sequence
  Chr21_5 Forward Primer
gcaatcatttcccagagagc

SEQ ID NO: 21508 - DNA, 20 bp, Artificial Sequence
  Chr21_5 Forward Primer
cagctgccaatagggattgt

SEQ ID NO: 21509 - DNA, 20 bp, Artificial Sequence
  Chr21_5 Forward Primer
catagaggtgtccaactggg

SEQ ID NO: 21510 - DNA, 20 bp, Artificial Sequence
  Chr21_5 Forward Primer
cagtaaaactgtggtggggg

SEQ ID NO: 21511 - DNA, 23 bp, Artificial Sequence
  Chr21_5 Forward Primer
tgagtgtttattgtggagccttt

SEQ ID NO: 21512 - DNA, 20 bp, Artificial Sequence
  Chr21_5 Forward Primer
atgcataggtgatgagggct

SEQ ID NO: 21513 - DNA, 20 bp, Artificial Sequence
  Chr21_5 Forward Primer
gaagagctccttggcacatc

SEQ ID NO: 21514 - DNA, 20 bp, Artificial Sequence
  Chr21_5 Forward Primer
cacggctggagtgaaatgta

SEQ ID NO: 21515 - DNA, 20 bp, Artificial Sequence
  Chr21_5 Forward Primer
agaggctctcctgtggttca

SEQ ID NO: 21516 - DNA, 20 bp, Artificial Sequence
  Chr21_5 Forward Primer
atgcagacctcatcccagag

SEQ ID NO: 21517 - DNA, 22 bp, Artificial Sequence
  Chr21_5 Forward Primer
ccagcaattccacttgtaagaa

SEQ ID NO: 21518 - DNA, 22 bp, Artificial Sequence
  Chr21_5 Forward Primer
gcgtctgcacagatatttacca

SEQ ID NO: 21519 - DNA, 20 bp, Artificial Sequence
  Chr21_5 Forward Primer
actttggaatgggggaagat

SEQ ID NO: 21520 - DNA, 20 bp, Artificial Sequence
  Chr21_5 Forward Primer
gggcttgcgttattagtgga

SEQ ID NO: 21521 - DNA, 21 bp, Artificial Sequence
  Chr21_5 Forward Primer
ccctccagttcgatagaatca

SEQ ID NO: 21522 - DNA, 20 bp, Artificial Sequence
  Chr21_5 Forward Primer
atggatgactggctcacaca

SEQ ID NO: 21523 - DNA, 21 bp, Artificial Sequence
  Chr21_5 Forward Primer
aagagcacagaggctttttga

SEQ ID NO: 21524 - DNA, 20 bp, Artificial Sequence
  Chr21_5 Forward Primer
aattttctggcacaaggcaa

SEQ ID NO: 21525 - DNA, 20 bp, Artificial Sequence
  Chr21_5 Forward Primer
ttggcaatgaaaccatgttc

SEQ ID NO: 21526 - DNA, 20 bp, Artificial Sequence
  Chr21_5 Forward Primer
ttgggagagttggagaatgg

SEQ ID NO: 21527 - DNA, 20 bp, Artificial Sequence
  Chr21_5 Forward Primer
ttctgaccttcctccagtcc

SEQ ID NO: 21528 - DNA, 25 bp, Artificial Sequence
  Chr21_5 Forward Primer
tggtaccttccttataggatgactg

SEQ ID NO: 21529 - DNA, 23 bp, Artificial Sequence
  Chr21_5 Forward Primer
caagatgaggggaaatacttcag

SEQ ID NO: 21530 - DNA, 20 bp, Artificial Sequence
  Chr21_5 Forward Primer
taaacatcttccctgccagc

SEQ ID NO: 21531 - DNA, 21 bp, Artificial Sequence
  Chr21_5 Forward Primer
gacaaattggacctgactgga

SEQ ID NO: 21532 - DNA, 20 bp, Artificial Sequence
  Chr21_5 Forward Primer
acttgccaaggtcatttgct

SEQ ID NO: 21533 - DNA, 20 bp, Artificial Sequence
  Chr21_5 Forward Primer
tggttgcaaaacaatccaaa

SEQ ID NO: 21534 - DNA, 20 bp, Artificial Sequence
  Chr21_5 Forward Primer
ggccggacatgacttgtatt

SEQ ID NO: 21535 - DNA, 20 bp, Artificial Sequence
  Chr21_5 Forward Primer
gagctagaaccagcaccagg

SEQ ID NO: 21536 - DNA, 20 bp, Artificial Sequence
  Chr21_5 Forward Primer
aggggagatttgaggagcat

SEQ ID NO: 21537 - DNA, 20 bp, Artificial Sequence
  Chr21_5 Forward Primer
ggaggagagaccagcaatgt

SEQ ID NO: 21538 - DNA, 20 bp, Artificial Sequence
  Chr21_5 Forward Primer
tccaatatcaagtcctgggc

SEQ ID NO: 21539 - DNA, 20 bp, Artificial Sequence
  Chr21_5 Forward Primer
gctgatttctctccagaggc

SEQ ID NO: 21540 - DNA, 20 bp, Artificial Sequence
  Chr21_5 Forward Primer
gcccacttctgaattaacgg

SEQ ID NO: 21541 - DNA, 20 bp, Artificial Sequence
  Chr21_5 Forward Primer
cggggcattgtacattttct

SEQ ID NO: 21542 - DNA, 22 bp, Artificial Sequence
  Chr21_5 Forward Primer
tcaggaacatcagcctaatcct

SEQ ID NO: 21543 - DNA, 20 bp, Artificial Sequence
  Chr21_5 Forward Primer
tgaacatgagatgtccccaa

SEQ ID NO: 21544 - DNA, 20 bp, Artificial Sequence
  Chr21_5 Forward Primer
cctagtggctgcctaaatgg

SEQ ID NO: 21545 - DNA, 20 bp, Artificial Sequence
  Chr21_5 Forward Primer
agtggcttttgcaggaagaa

SEQ ID NO: 21546 - DNA, 21 bp, Artificial Sequence
  Chr21_5 Forward Primer
tctgagaggcagaatttccaa

SEQ ID NO: 21547 - DNA, 20 bp, Artificial Sequence
  Chr21_5 Forward Primer
ctacagtcctagggcatccg

SEQ ID NO: 21548 - DNA, 20 bp, Artificial Sequence
  Chr21_5 Forward Primer
tctcagtgtgggtgtccaaa

SEQ ID NO: 21549 - DNA, 20 bp, Artificial Sequence
  Chr21_5 Forward Primer
gctggaaagacttcgtgcat

SEQ ID NO: 21550 - DNA, 20 bp, Artificial Sequence
  Chr21_5 Forward Primer
ggcttcttgcatgagaaagg

SEQ ID NO: 21551 - DNA, 20 bp, Artificial Sequence
  Chr21_5 Forward Primer
gacgcttgctacagacgtga

SEQ ID NO: 21552 - DNA, 20 bp, Artificial Sequence
  Chr21_5 Forward Primer
aatgcctaaccccaagtcaa

SEQ ID NO: 21553 - DNA, 20 bp, Artificial Sequence
  Chr21_5 Forward Primer
cagacaccaagatggggaat

SEQ ID NO: 21554 - DNA, 20 bp, Artificial Sequence
  Chr21_5 Forward Primer
aaatcgccctaaatcccatc

SEQ ID NO: 21555 - DNA, 20 bp, Artificial Sequence
  Chr21_5 Forward Primer
tatacgaatgcagacggcac

SEQ ID NO: 21556 - DNA, 22 bp, Artificial Sequence
  Chr21_5 Forward Primer
gcaatggaaacaagatctctcc

SEQ ID NO: 21557 - DNA, 20 bp, Artificial Sequence
  Chr21_5 Reverse Primer
ggcttgctgtcactgaaggt

SEQ ID NO: 21558 - DNA, 20 bp, Artificial Sequence
  Chr21_5 Reverse Primer
cttgttcctggacttcccct

SEQ ID NO: 21559 - DNA, 20 bp, Artificial Sequence
  Chr21_5 Reverse Primer
gcagtccactgggaaacagt

SEQ ID NO: 21560 - DNA, 22 bp, Artificial Sequence
  Chr21_5 Reverse Primer
tcccgagaattatccagaagac

SEQ ID NO: 21561 - DNA, 20 bp, Artificial Sequence
  Chr21_5 Reverse Primer
aagccaacgagttcttggaa

SEQ ID NO: 21562 - DNA, 20 bp, Artificial Sequence
  Chr21_5 Reverse Primer
cttcagaaccatcgcacaga

SEQ ID NO: 21563 - DNA, 20 bp, Artificial Sequence
  Chr21_5 Reverse Primer
tttgctctttctgccttacg

SEQ ID NO: 21564 - DNA, 25 bp, Artificial Sequence
  Chr21_5 Reverse Primer
catacatgttggctatttcttcctt

SEQ ID NO: 21565 - DNA, 20 bp, Artificial Sequence
  Chr21_5 Reverse Primer
agcagagccaggggttaagt

SEQ ID NO: 21566 - DNA, 20 bp, Artificial Sequence
  Chr21_5 Reverse Primer
tccagagagactcaggggaa

SEQ ID NO: 21567 - DNA, 20 bp, Artificial Sequence
  Chr21_5 Reverse Primer
gcactgctgtaacccgatct

SEQ ID NO: 21568 - DNA, 20 bp, Artificial Sequence
  Chr21_5 Reverse Primer
atgcacctggctaaggaaga

SEQ ID NO: 21569 - DNA, 20 bp, Artificial Sequence
  Chr21_5 Reverse Primer
tctctagctcgtggttgggt

SEQ ID NO: 21570 - DNA, 20 bp, Artificial Sequence
  Chr21_5 Reverse Primer
tatccaaaggaagtgggcag

SEQ ID NO: 21571 - DNA, 20 bp, Artificial Sequence
  Chr21_5 Reverse Primer
ggttagaagcagaccgtcca

SEQ ID NO: 21572 - DNA, 20 bp, Artificial Sequence
  Chr21_5 Reverse Primer
gcccatcctcctgtcttgta

SEQ ID NO: 21573 - DNA, 20 bp, Artificial Sequence
  Chr21_5 Reverse Primer
ctaccagaggcccttgaaca

SEQ ID NO: 21574 - DNA, 23 bp, Artificial Sequence
  Chr21_5 Reverse Primer
ctctcaaaacaaatacatgcagc

SEQ ID NO: 21575 - DNA, 20 bp, Artificial Sequence
  Chr21_5 Reverse Primer
gcgcctaccaagcaaaatta

SEQ ID NO: 21576 - DNA, 20 bp, Artificial Sequence
  Chr21_5 Reverse Primer
ggagaagggaggttgctctt

SEQ ID NO: 21577 - DNA, 20 bp, Artificial Sequence
  Chr21_5 Reverse Primer
cccttcttgattgacctgga

SEQ ID NO: 21578 - DNA, 20 bp, Artificial Sequence
  Chr21_5 Reverse Primer
tggtgaacaagaatcaccca

SEQ ID NO: 21579 - DNA, 24 bp, Artificial Sequence
  Chr21_5 Reverse Primer
gaaggaggtagaatctgtctcaca

SEQ ID NO: 21580 - DNA, 20 bp, Artificial Sequence
  Chr21_5 Reverse Primer
cagctttgcaaatggaagtc

SEQ ID NO: 21581 - DNA, 20 bp, Artificial Sequence
  Chr21_5 Reverse Primer
cgggatcatccaaaagtgac

SEQ ID NO: 21582 - DNA, 20 bp, Artificial Sequence
  Chr21_5 Reverse Primer
ccattcatgcaggaggtgta

SEQ ID NO: 21583 - DNA, 20 bp, Artificial Sequence
  Chr21_5 Reverse Primer
tgactcacaagccaggaatg

SEQ ID NO: 21584 - DNA, 20 bp, Artificial Sequence
  Chr21_5 Reverse Primer
cgagaatgccatgaaaacct

SEQ ID NO: 21585 - DNA, 20 bp, Artificial Sequence
  Chr21_5 Reverse Primer
ccatcactgagccactctga

SEQ ID NO: 21586 - DNA, 26 bp, Artificial Sequence
  Chr21_5 Reverse Primer
gaaaggataaataaattggacaaaaa

SEQ ID NO: 21587 - DNA, 21 bp, Artificial Sequence
  Chr21_5 Reverse Primer
tgaagaccttttccacatcct

SEQ ID NO: 21588 - DNA, 20 bp, Artificial Sequence
  Chr21_5 Reverse Primer
gtcactttgcgtgtgagtgg

SEQ ID NO: 21589 - DNA, 20 bp, Artificial Sequence
  Chr21_5 Reverse Primer
gaaggtatcgggggaaatgt

SEQ ID NO: 21590 - DNA, 21 bp, Artificial Sequence
  Chr21_5 Reverse Primer
tgtttcagtgattccagcaaa

SEQ ID NO: 21591 - DNA, 20 bp, Artificial Sequence
  Chr21_5 Reverse Primer
tgccttgtgttgccaattta

SEQ ID NO: 21592 - DNA, 20 bp, Artificial Sequence
  Chr21_5 Reverse Primer
tatacccagcttccattggc

SEQ ID NO: 21593 - DNA, 20 bp, Artificial Sequence
  Chr21_5 Reverse Primer
aatccattctcctggggtta

SEQ ID NO: 21594 - DNA, 20 bp, Artificial Sequence
  Chr21_5 Reverse Primer
tctcattcctatgcattgcc

SEQ ID NO: 21595 - DNA, 20 bp, Artificial Sequence
  Chr21_5 Reverse Primer
aacatgaaactttgggccag

SEQ ID NO: 21596 - DNA, 20 bp, Artificial Sequence
  Chr21_5 Reverse Primer
taatgccttctccctcctga

SEQ ID NO: 21597 - DNA, 20 bp, Artificial Sequence
  Chr21_5 Reverse Primer
gatactcctaagccctgccc

SEQ ID NO: 21598 - DNA, 20 bp, Artificial Sequence
  Chr21_5 Reverse Primer
ctctctggccacttcctacg

SEQ ID NO: 21599 - DNA, 20 bp, Artificial Sequence
  Chr21_5 Reverse Primer
cagcacaattcgattgcttg

SEQ ID NO: 21600 - DNA, 21 bp, Artificial Sequence
  Chr21_5 Reverse Primer
gttcacattgtttgggtttgg

SEQ ID NO: 21601 - DNA, 20 bp, Artificial Sequence
  Chr21_5 Reverse Primer
tttgttcagaacctccctgc

SEQ ID NO: 21602 - DNA, 20 bp, Artificial Sequence
  Chr21_5 Reverse Primer
ggcaagtcattgctgtcaga

SEQ ID NO: 21603 - DNA, 23 bp, Artificial Sequence
  Chr21_5 Reverse Primer
tggggaccaattattctattttg

SEQ ID NO: 21604 - DNA, 20 bp, Artificial Sequence
  Chr21_5 Reverse Primer
ctatcaggaagcttgaccgc

SEQ ID NO: 21605 - DNA, 20 bp, Artificial Sequence
  Chr21_5 Reverse Primer
aaccacttgtgctcaccctt

SEQ ID NO: 21606 - DNA, 24 bp, Artificial Sequence
  Chr21_5 Reverse Primer
tgctttccacaaactaaacatagc

SEQ ID NO: 21607 - DNA, 21 bp, Artificial Sequence
  Chr21_5 Reverse Primer
gcagttgccttggctaaataa

SEQ ID NO: 21608 - DNA, 20 bp, Artificial Sequence
  Chr21_5 Reverse Primer
gccataaagatggcaggtgt

SEQ ID NO: 21609 - DNA, 20 bp, Artificial Sequence
  Chr21_5 Reverse Primer
tctgtccagtctcccactcc

SEQ ID NO: 21610 - DNA, 20 bp, Artificial Sequence
  Chr21_5 Reverse Primer
ttgctgatctttggcatctg

SEQ ID NO: 21611 - DNA, 20 bp, Artificial Sequence
  Chr21_5 Reverse Primer
gggtcaggttccaatgtgtc

SEQ ID NO: 21612 - DNA, 20 bp, Artificial Sequence
  Chr21_5 Reverse Primer
ctccagaaaggtcatcccaa

SEQ ID NO: 21613 - DNA, 22 bp, Artificial Sequence
  Chr21_5 Reverse Primer
caatgtgtacatgtttttgcca

SEQ ID NO: 21614 - DNA, 20 bp, Artificial Sequence
  Chr21_5 Reverse Primer
ggggttacccacaggttttt

SEQ ID NO: 21615 - DNA, 20 bp, Artificial Sequence
  Chr21_5 Reverse Primer
tgtcccaaatgccagtcttt

SEQ ID NO: 21616 - DNA, 20 bp, Artificial Sequence
  Chr21_5 Reverse Primer
ggcagtcatcagtgttgcag

SEQ ID NO: 21617 - DNA, 19 bp, Artificial Sequence
  Chr21_5 Reverse Primer
cctgtcacccacaagcatc

SEQ ID NO: 21618 - DNA, 20 bp, Artificial Sequence
  Chr21_5 Reverse Primer
gaaacaaaagttacgcccca

SEQ ID NO: 21619 - DNA, 20 bp, Artificial Sequence
  Chr21_5 Reverse Primer
cagcccagactcacctcatc

SEQ ID NO: 21620 - DNA, 20 bp, Artificial Sequence
  Chr21_5 Reverse Primer
caggcttgttctgttcacga

SEQ ID NO: 21621 - DNA, 21 bp, Artificial Sequence
  Chr21_5 Reverse Primer
gaagagtcctccaagcaacaa

SEQ ID NO: 21622 - DNA, 20 bp, Artificial Sequence
  Chr21_5 Reverse Primer
atggacaaaagcgagattgg

SEQ ID NO: 21623 - DNA, 21 bp, Artificial Sequence
  Chr21_5 Reverse Primer
tcaggcaactgaggtatgagg

SEQ ID NO: 21624 - DNA, 27 bp, Artificial Sequence
  Chr21_5 Reverse Primer
aaattatctaaatatggctatctctgc

SEQ ID NO: 21625 - DNA, 20 bp, Artificial Sequence
  Chr21_5 Reverse Primer
ggatctccatgctccaagaa

SEQ ID NO: 21626 - DNA, 20 bp, Artificial Sequence
  Chr21_5 Reverse Primer
ataaatgcagcccctggaat

SEQ ID NO: 21627 - DNA, 21 bp, Artificial Sequence
  Chr21_5 Reverse Primer
gcccactgaataaggaagatg

SEQ ID NO: 21628 - DNA, 20 bp, Artificial Sequence
  Chr21_5 Reverse Primer
ttccatcccattcaaaggag

SEQ ID NO: 21629 - DNA, 20 bp, Artificial Sequence
  Chr21_5 Reverse Primer
agtgtgattgaggcagcaca

SEQ ID NO: 21630 - DNA, 20 bp, Artificial Sequence
  Chr21_5 Reverse Primer
aaatgttcccgattctctgc

SEQ ID NO: 21631 - DNA, 20 bp, Artificial Sequence
  Chr21_5 Reverse Primer
tgcaccttcaggtcttgttg

SEQ ID NO: 21632 - DNA, 20 bp, Artificial Sequence
  Chr21_5 Reverse Primer
tgaaagctctgtgaggcaga

SEQ ID NO: 21633 - DNA, 21 bp, Artificial Sequence
  Chr21_5 Reverse Primer
gacatcagaagactgggatgg

SEQ ID NO: 21634 - DNA, 20 bp, Artificial Sequence
  Chr21_5 Reverse Primer
tggcatgactgatgcagaac

SEQ ID NO: 21635 - DNA, 19 bp, Artificial Sequence
  Chr21_5 Reverse Primer
agctgggatgtgggaaatg

SEQ ID NO: 21636 - DNA, 20 bp, Artificial Sequence
  Chr21_5 Reverse Primer
tctcctccaacccctatgtg

SEQ ID NO: 21637 - DNA, 20 bp, Artificial Sequence
  Chr21_5 Reverse Primer
cagcactcaccccctgtatt

SEQ ID NO: 21638 - DNA, 19 bp, Artificial Sequence
  Chr21_5 Reverse Primer
cccattctggttcacctcc

SEQ ID NO: 21639 - DNA, 20 bp, Artificial Sequence
  Chr21_5 Reverse Primer
tggtcttaacagcagggctt

SEQ ID NO: 21640 - DNA, 20 bp, Artificial Sequence
  Chr21_5 Reverse Primer
aggagctgcctacgtcagag

SEQ ID NO: 21641 - DNA, 20 bp, Artificial Sequence
  Chr21_5 Reverse Primer
gcaaagccagatgcagaaat

SEQ ID NO: 21642 - DNA, 25 bp, Artificial Sequence
  Chr21_5 Reverse Primer
gactcaatctttttatttttgaggg

SEQ ID NO: 21643 - DNA, 20 bp, Artificial Sequence
  Chr21_5 Reverse Primer
agtcccaatggggattaagg

SEQ ID NO: 21644 - DNA, 19 bp, Artificial Sequence
  Chr21_5 Reverse Primer
gctgccattgtgaaatgct

SEQ ID NO: 21645 - DNA, 21 bp, Artificial Sequence
  Chr21_5 Reverse Primer
tcgaatccaatttcaagtcgt

SEQ ID NO: 21646 - DNA, 20 bp, Artificial Sequence
  Chr21_5 Reverse Primer
ggccctgctaatttcaaggt

SEQ ID NO: 21647 - DNA, 20 bp, Artificial Sequence
  Chr21_5 Reverse Primer
acgcacacacacacacacac

SEQ ID NO: 21648 - DNA, 20 bp, Artificial Sequence
  Chr21_5 Reverse Primer
ttaaatggcgctaccctttc

SEQ ID NO: 21649 - DNA, 20 bp, Artificial Sequence
  Chr21_5 Reverse Primer
gcctggactgagttcgtttc

SEQ ID NO: 21650 - DNA, 20 bp, Artificial Sequence
  Chr21_5 Reverse Primer
agttgtggcggtttctcaag

SEQ ID NO: 21651 - DNA, 20 bp, Artificial Sequence
  Chr21_5 Reverse Primer
agtcagaccaggctgaaagc

SEQ ID NO: 21652 - DNA, 24 bp, Artificial Sequence
  Chr21_5 Reverse Primer
cactgacacaagacctattttcct

SEQ ID NO: 21653 - DNA, 21 bp, Artificial Sequence
  Chr21_6 Forward Primer
tctggattggcttcagaaaaa

SEQ ID NO: 21654 - DNA, 20 bp, Artificial Sequence
  Chr21_6 Forward Primer
gtgggtgagggtggatacag

SEQ ID NO: 21655 - DNA, 19 bp, Artificial Sequence
  Chr21_6 Forward Primer
aggctctgctcccactgag

SEQ ID NO: 21656 - DNA, 20 bp, Artificial Sequence
  Chr21_6 Forward Primer
aaggagccaatctgctttca

SEQ ID NO: 21657 - DNA, 20 bp, Artificial Sequence
  Chr21_6 Forward Primer
gggcccctttaatgtcaagt

SEQ ID NO: 21658 - DNA, 20 bp, Artificial Sequence
  Chr21_6 Forward Primer
catcatgagcaagaagccaa

SEQ ID NO: 21659 - DNA, 20 bp, Artificial Sequence
  Chr21_6 Forward Primer
gcaaagtctcctcggatgtc

SEQ ID NO: 21660 - DNA, 20 bp, Artificial Sequence
  Chr21_6 Forward Primer
tcgctctttccacacaaaca

SEQ ID NO: 21661 - DNA, 20 bp, Artificial Sequence
  Chr21_6 Forward Primer
gggcatttttgctgactgtt

SEQ ID NO: 21662 - DNA, 20 bp, Artificial Sequence
  Chr21_6 Forward Primer
gcagcattgtacgacgacat

SEQ ID NO: 21663 - DNA, 20 bp, Artificial Sequence
  Chr21_6 Forward Primer
aatgggtgaaaatgggaaaa

SEQ ID NO: 21664 - DNA, 20 bp, Artificial Sequence
  Chr21_6 Forward Primer
taaccttttcacctgtgggc

SEQ ID NO: 21665 - DNA, 22 bp, Artificial Sequence
  Chr21_6 Forward Primer
tccagacttgtttgtggaagaa

SEQ ID NO: 21666 - DNA, 20 bp, Artificial Sequence
  Chr21_6 Forward Primer
gttaatgctcccttgagcca

SEQ ID NO: 21667 - DNA, 20 bp, Artificial Sequence
  Chr21_6 Forward Primer
aaagctttttggatggggat

SEQ ID NO: 21668 - DNA, 23 bp, Artificial Sequence
  Chr21_6 Forward Primer
ccacataactttacttctggggt

SEQ ID NO: 21669 - DNA, 20 bp, Artificial Sequence
  Chr21_6 Forward Primer
cgtccctagaaatcagcacc

SEQ ID NO: 21670 - DNA, 20 bp, Artificial Sequence
  Chr21_6 Forward Primer
ccccacgtgaaattccatac

SEQ ID NO: 21671 - DNA, 20 bp, Artificial Sequence
  Chr21_6 Forward Primer
acacactgtgggagaaaggc

SEQ ID NO: 21672 - DNA, 21 bp, Artificial Sequence
  Chr21_6 Forward Primer
cagtgggttcaagtgaggttc

SEQ ID NO: 21673 - DNA, 20 bp, Artificial Sequence
  Chr21_6 Forward Primer
agcaccctcaggagagtcag

SEQ ID NO: 21674 - DNA, 20 bp, Artificial Sequence
  Chr21_6 Forward Primer
agcaaatgtcccacaaggag

SEQ ID NO: 21675 - DNA, 22 bp, Artificial Sequence
  Chr21_6 Forward Primer
gcccatccaatacacagtaaaa

SEQ ID NO: 21676 - DNA, 20 bp, Artificial Sequence
  Chr21_6 Forward Primer
ggagcatcaagcatctgtca

SEQ ID NO: 21677 - DNA, 20 bp, Artificial Sequence
  Chr21_6 Forward Primer
gcaatgaacagactcagcca

SEQ ID NO: 21678 - DNA, 20 bp, Artificial Sequence
  Chr21_6 Forward Primer
cactcccaaaagcattttca

SEQ ID NO: 21679 - DNA, 20 bp, Artificial Sequence
  Chr21_6 Forward Primer
ggcagagagctcagcctaga

SEQ ID NO: 21680 - DNA, 20 bp, Artificial Sequence
  Chr21_6 Forward Primer
ctgagacatcggggaatgat

SEQ ID NO: 21681 - DNA, 20 bp, Artificial Sequence
  Chr21_6 Forward Primer
ttaagtgaccccgtgtgtga

SEQ ID NO: 21682 - DNA, 20 bp, Artificial Sequence
  Chr21_6 Forward Primer
aaatagatgaccgagaggcg

SEQ ID NO: 21683 - DNA, 20 bp, Artificial Sequence
  Chr21_6 Forward Primer
gcctcttagcacagacctgg

SEQ ID NO: 21684 - DNA, 20 bp, Artificial Sequence
  Chr21_6 Forward Primer
gcaatccttgcttgctttgt

SEQ ID NO: 21685 - DNA, 20 bp, Artificial Sequence
  Chr21_6 Forward Primer
acaataccccaattgcaagg

SEQ ID NO: 21686 - DNA, 20 bp, Artificial Sequence
  Chr21_6 Forward Primer
ttgctggttcctccaatgat

SEQ ID NO: 21687 - DNA, 20 bp, Artificial Sequence
  Chr21_6 Forward Primer
ggaagtgctatttcccacca

SEQ ID NO: 21688 - DNA, 20 bp, Artificial Sequence
  Chr21_6 Forward Primer
atagttcccccagacagcct

SEQ ID NO: 21689 - DNA, 20 bp, Artificial Sequence
  Chr21_6 Forward Primer
cgaggtgatcttaagcgagg

SEQ ID NO: 21690 - DNA, 20 bp, Artificial Sequence
  Chr21_6 Forward Primer
tcagtttctgtgggggaaag

SEQ ID NO: 21691 - DNA, 20 bp, Artificial Sequence
  Chr21_6 Forward Primer
gtagctgcccagcctgatag

SEQ ID NO: 21692 - DNA, 20 bp, Artificial Sequence
  Chr21_6 Forward Primer
cctcagactgaaaagcctcc

SEQ ID NO: 21693 - DNA, 20 bp, Artificial Sequence
  Chr21_6 Forward Primer
cctcctggacacagaagctc

SEQ ID NO: 21694 - DNA, 20 bp, Artificial Sequence
  Chr21_6 Forward Primer
cagcaaacacagctgaccat

SEQ ID NO: 21695 - DNA, 20 bp, Artificial Sequence
  Chr21_6 Forward Primer
agcacaggcttttgttttcc

SEQ ID NO: 21696 - DNA, 20 bp, Artificial Sequence
  Chr21_6 Forward Primer
gcttctcttgttctgctggg

SEQ ID NO: 21697 - DNA, 20 bp, Artificial Sequence
  Chr21_6 Forward Primer
ccaggtttcccatcttcctt

SEQ ID NO: 21698 - DNA, 20 bp, Artificial Sequence
  Chr21_6 Forward Primer
agcgtagaagaccgaggaca

SEQ ID NO: 21699 - DNA, 20 bp, Artificial Sequence
  Chr21_6 Forward Primer
tctcctcccctacctttgtg

SEQ ID NO: 21700 - DNA, 23 bp, Artificial Sequence
  Chr21_6 Forward Primer
tcaaatgaggaatcaatcagtca

SEQ ID NO: 21701 - DNA, 20 bp, Artificial Sequence
  Chr21_6 Forward Primer
tttttcccctttgcactcac

SEQ ID NO: 21702 - DNA, 20 bp, Artificial Sequence
  Chr21_6 Forward Primer
ctcccagtgatcctacccct

SEQ ID NO: 21703 - DNA, 20 bp, Artificial Sequence
  Chr21_6 Forward Primer
tacaaggcttccaaagccag

SEQ ID NO: 21704 - DNA, 20 bp, Artificial Sequence
  Chr21_6 Forward Primer
gcaagcaggatagaacaggc

SEQ ID NO: 21705 - DNA, 20 bp, Artificial Sequence
  Chr21_6 Forward Primer
aggtcccaggagaggtcagt

SEQ ID NO: 21706 - DNA, 20 bp, Artificial Sequence
  Chr21_6 Forward Primer
atacagcacagaggcccaag

SEQ ID NO: 21707 - DNA, 21 bp, Artificial Sequence
  Chr21_6 Forward Primer
ggagaaagtaacagcacagcc

SEQ ID NO: 21708 - DNA, 20 bp, Artificial Sequence
  Chr21_6 Forward Primer
attgacatggatgcaccaga

SEQ ID NO: 21709 - DNA, 20 bp, Artificial Sequence
  Chr21_6 Forward Primer
tccattttcattcctcctgc

SEQ ID NO: 21710 - DNA, 20 bp, Artificial Sequence
  Chr21_6 Forward Primer
ccctggggaattatgactga

SEQ ID NO: 21711 - DNA, 20 bp, Artificial Sequence
  Chr21_6 Forward Primer
catagagaggacctcaccgc

SEQ ID NO: 21712 - DNA, 20 bp, Artificial Sequence
  Chr21_6 Forward Primer
aagggatggtgtgagtgagg

SEQ ID NO: 21713 - DNA, 20 bp, Artificial Sequence
  Chr21_6 Forward Primer
aaaagaggaccacaggctga

SEQ ID NO: 21714 - DNA, 20 bp, Artificial Sequence
  Chr21_6 Forward Primer
gcacagcagaaaatcccaat

SEQ ID NO: 21715 - DNA, 20 bp, Artificial Sequence
  Chr21_6 Forward Primer
gggagcaccttttccttacc

SEQ ID NO: 21716 - DNA, 20 bp, Artificial Sequence
  Chr21_6 Forward Primer
acggcagatcatggagaatc

SEQ ID NO: 21717 - DNA, 20 bp, Artificial Sequence
  Chr21_6 Forward Primer
ttgtgttaaggtggttggca

SEQ ID NO: 21718 - DNA, 20 bp, Artificial Sequence
  Chr21_6 Forward Primer
gggctcagcctgtctgaata

SEQ ID NO: 21719 - DNA, 20 bp, Artificial Sequence
  Chr21_6 Forward Primer
gcccatgagagatgaagagg

SEQ ID NO: 21720 - DNA, 23 bp, Artificial Sequence
  Chr21_6 Forward Primer
ggtgttgctgttatctcaaagaa

SEQ ID NO: 21721 - DNA, 20 bp, Artificial Sequence
  Chr21_6 Forward Primer
agaccatctcacgggttgtc

SEQ ID NO: 21722 - DNA, 20 bp, Artificial Sequence
  Chr21_6 Forward Primer
actcttcccctctggttgct

SEQ ID NO: 21723 - DNA, 20 bp, Artificial Sequence
  Chr21_6 Forward Primer
ggctttctctggcatctgac

SEQ ID NO: 21724 - DNA, 20 bp, Artificial Sequence
  Chr21_6 Forward Primer
ccatgccttcctgctgtatt

SEQ ID NO: 21725 - DNA, 20 bp, Artificial Sequence
  Chr21_6 Forward Primer
catgcttacctcccctcaaa

SEQ ID NO: 21726 - DNA, 20 bp, Artificial Sequence
  Chr21_6 Forward Primer
aaagacaaacccccaaatcc

SEQ ID NO: 21727 - DNA, 20 bp, Artificial Sequence
  Chr21_6 Forward Primer
cccacatacctactcacccg

SEQ ID NO: 21728 - DNA, 20 bp, Artificial Sequence
  Chr21_6 Forward Primer
gagtccaaagtcagccggta

SEQ ID NO: 21729 - DNA, 20 bp, Artificial Sequence
  Chr21_6 Forward Primer
acaaatgcctgctgttagcc

SEQ ID NO: 21730 - DNA, 20 bp, Artificial Sequence
  Chr21_6 Forward Primer
tgcatctgggtttgacttga

SEQ ID NO: 21731 - DNA, 20 bp, Artificial Sequence
  Chr21_6 Forward Primer
ttgcagctcacctgttatgc

SEQ ID NO: 21732 - DNA, 22 bp, Artificial Sequence
  Chr21_6 Forward Primer
ctgcagcaacatgattatacca

SEQ ID NO: 21733 - DNA, 20 bp, Artificial Sequence
  Chr21_6 Forward Primer
aataaatctggctgccatgc

SEQ ID NO: 21734 - DNA, 20 bp, Artificial Sequence
  Chr21_6 Forward Primer
tcaaagagcgtgaatgttgc

SEQ ID NO: 21735 - DNA, 20 bp, Artificial Sequence
  Chr21_6 Forward Primer
ccagtaacggtggcttcaat

SEQ ID NO: 21736 - DNA, 20 bp, Artificial Sequence
  Chr21_6 Forward Primer
ctcatgggccatcttttgtg

SEQ ID NO: 21737 - DNA, 20 bp, Artificial Sequence
  Chr21_6 Forward Primer
ctggtgggacttggaggata

SEQ ID NO: 21738 - DNA, 20 bp, Artificial Sequence
  Chr21_6 Forward Primer
aggagaacccatcccaagac

SEQ ID NO: 21739 - DNA, 20 bp, Artificial Sequence
  Chr21_6 Forward Primer
tccctacaagggaaggaagg

SEQ ID NO: 21740 - DNA, 20 bp, Artificial Sequence
  Chr21_6 Forward Primer
tccttgagaaagggacagga

SEQ ID NO: 21741 - DNA, 20 bp, Artificial Sequence
  Chr21_6 Forward Primer
gcatgtgtgacttggtgctc

SEQ ID NO: 21742 - DNA, 20 bp, Artificial Sequence
  Chr21_6 Forward Primer
atggtcctcactccctgaga

SEQ ID NO: 21743 - DNA, 20 bp, Artificial Sequence
  Chr21_6 Forward Primer
gattccactgtagcccctca

SEQ ID NO: 21744 - DNA, 20 bp, Artificial Sequence
  Chr21_6 Forward Primer
gtggctttccatagggttca

SEQ ID NO: 21745 - DNA, 21 bp, Artificial Sequence
  Chr21_6 Forward Primer
gcttggataatcaatgccaga

SEQ ID NO: 21746 - DNA, 20 bp, Artificial Sequence
  Chr21_6 Forward Primer
catcctcctatttgcccaga

SEQ ID NO: 21747 - DNA, 20 bp, Artificial Sequence
  Chr21_6 Forward Primer
gacttttcagagcctgtgcc

SEQ ID NO: 21748 - DNA, 20 bp, Artificial Sequence
  Chr21_6 Forward Primer
tctgccaaagaagagaagcc

SEQ ID NO: 21749 - DNA, 20 bp, Artificial Sequence
  Chr21_6 Reverse Primer
ttacaccgactgtggggaac

SEQ ID NO: 21750 - DNA, 20 bp, Artificial Sequence
  Chr21_6 Reverse Primer
ctttctggaagcccacagtc

SEQ ID NO: 21751 - DNA, 20 bp, Artificial Sequence
  Chr21_6 Reverse Primer
gcaaagcttagcctctcctc

SEQ ID NO: 21752 - DNA, 20 bp, Artificial Sequence
  Chr21_6 Reverse Primer
catggtgcagaaaagagcaa

SEQ ID NO: 21753 - DNA, 20 bp, Artificial Sequence
  Chr21_6 Reverse Primer
cccgaggaaaaagcgatagt

SEQ ID NO: 21754 - DNA, 20 bp, Artificial Sequence
  Chr21_6 Reverse Primer
accattccacatcccaagag

SEQ ID NO: 21755 - DNA, 20 bp, Artificial Sequence
  Chr21_6 Reverse Primer
gttgggtgagaggaggatca

SEQ ID NO: 21756 - DNA, 20 bp, Artificial Sequence
  Chr21_6 Reverse Primer
cttcaaagcactttccccaa

SEQ ID NO: 21757 - DNA, 20 bp, Artificial Sequence
  Chr21_6 Reverse Primer
actgcaggtgaaccaggaac

SEQ ID NO: 21758 - DNA, 20 bp, Artificial Sequence
  Chr21_6 Reverse Primer
cattgcccttactttcccct

SEQ ID NO: 21759 - DNA, 20 bp, Artificial Sequence
  Chr21_6 Reverse Primer
ggcacccacttcttttgtgt

SEQ ID NO: 21760 - DNA, 20 bp, Artificial Sequence
  Chr21_6 Reverse Primer
tccacacacagccatcattt

SEQ ID NO: 21761 - DNA, 22 bp, Artificial Sequence
  Chr21_6 Reverse Primer
tgaggaaatacacaacagggag

SEQ ID NO: 21762 - DNA, 20 bp, Artificial Sequence
  Chr21_6 Reverse Primer
aaattttctgggatcagggc

SEQ ID NO: 21763 - DNA, 20 bp, Artificial Sequence
  Chr21_6 Reverse Primer
cttcccagggttgtgaaaag

SEQ ID NO: 21764 - DNA, 21 bp, Artificial Sequence
  Chr21_6 Reverse Primer
ggtttggagcaaagacatagc

SEQ ID NO: 21765 - DNA, 20 bp, Artificial Sequence
  Chr21_6 Reverse Primer
ggcagagcagaaatagacgc

SEQ ID NO: 21766 - DNA, 20 bp, Artificial Sequence
  Chr21_6 Reverse Primer
acacgtttctgcgtccttct

SEQ ID NO: 21767 - DNA, 21 bp, Artificial Sequence
  Chr21_6 Reverse Primer
aagaaggaagacaaaggctgg

SEQ ID NO: 21768 - DNA, 20 bp, Artificial Sequence
  Chr21_6 Reverse Primer
tgtgccccagcttctaaaat

SEQ ID NO: 21769 - DNA, 20 bp, Artificial Sequence
  Chr21_6 Reverse Primer
caagtgcctgaaaacacagg

SEQ ID NO: 21770 - DNA, 20 bp, Artificial Sequence
  Chr21_6 Reverse Primer
ccttccctgaactgcacatt

SEQ ID NO: 21771 - DNA, 20 bp, Artificial Sequence
  Chr21_6 Reverse Primer
cacagactccccttgaccat

SEQ ID NO: 21772 - DNA, 20 bp, Artificial Sequence
  Chr21_6 Reverse Primer
tccctgcaactaggatttgg

SEQ ID NO: 21773 - DNA, 20 bp, Artificial Sequence
  Chr21_6 Reverse Primer
caaaccacagaaaagccaca

SEQ ID NO: 21774 - DNA, 20 bp, Artificial Sequence
  Chr21_6 Reverse Primer
agattctgctgtctgcacca

SEQ ID NO: 21775 - DNA, 20 bp, Artificial Sequence
  Chr21_6 Reverse Primer
caccttctggtaagccctga

SEQ ID NO: 21776 - DNA, 20 bp, Artificial Sequence
  Chr21_6 Reverse Primer
tgccttcctgaggttcaaat

SEQ ID NO: 21777 - DNA, 20 bp, Artificial Sequence
  Chr21_6 Reverse Primer
gcacaaatccatgcttatcg

SEQ ID NO: 21778 - DNA, 21 bp, Artificial Sequence
  Chr21_6 Reverse Primer
cgcatttcttctagctttcca

SEQ ID NO: 21779 - DNA, 20 bp, Artificial Sequence
  Chr21_6 Reverse Primer
aaaaagctgggaacaaagca

SEQ ID NO: 21780 - DNA, 20 bp, Artificial Sequence
  Chr21_6 Reverse Primer
cagctgtgttgcccttgata

SEQ ID NO: 21781 - DNA, 20 bp, Artificial Sequence
  Chr21_6 Reverse Primer
tgaatgacctcctaacgcct

SEQ ID NO: 21782 - DNA, 20 bp, Artificial Sequence
  Chr21_6 Reverse Primer
cacctagggcatgacagagc

SEQ ID NO: 21783 - DNA, 20 bp, Artificial Sequence
  Chr21_6 Reverse Primer
cccaggaaaacaaatggaaa

SEQ ID NO: 21784 - DNA, 20 bp, Artificial Sequence
  Chr21_6 Reverse Primer
ggatctgggtcttgttccaa

SEQ ID NO: 21785 - DNA, 20 bp, Artificial Sequence
  Chr21_6 Reverse Primer
acggctcagcctataacagc

SEQ ID NO: 21786 - DNA, 20 bp, Artificial Sequence
  Chr21_6 Reverse Primer
ccaatggcccttgaataatg

SEQ ID NO: 21787 - DNA, 20 bp, Artificial Sequence
  Chr21_6 Reverse Primer
aacagcaattcccactccac

SEQ ID NO: 21788 - DNA, 20 bp, Artificial Sequence
  Chr21_6 Reverse Primer
gtatggacgaaacgaatgcc

SEQ ID NO: 21789 - DNA, 20 bp, Artificial Sequence
  Chr21_6 Reverse Primer
gccccagctcagaaatacaa

SEQ ID NO: 21790 - DNA, 20 bp, Artificial Sequence
  Chr21_6 Reverse Primer
ttaaagcacaggccacactg

SEQ ID NO: 21791 - DNA, 20 bp, Artificial Sequence
  Chr21_6 Reverse Primer
caaagccctcagtctccttg

SEQ ID NO: 21792 - DNA, 20 bp, Artificial Sequence
  Chr21_6 Reverse Primer
agggagcactgctgtttcat

SEQ ID NO: 21793 - DNA, 20 bp, Artificial Sequence
  Chr21_6 Reverse Primer
ggaggactaaacaagcacgg

SEQ ID NO: 21794 - DNA, 20 bp, Artificial Sequence
  Chr21_6 Reverse Primer
tacagggggccctttctact

SEQ ID NO: 21795 - DNA, 20 bp, Artificial Sequence
  Chr21_6 Reverse Primer
gctgttagaggagtggcagg

SEQ ID NO: 21796 - DNA, 20 bp, Artificial Sequence
  Chr21_6 Reverse Primer
ggcctgatttgtcttttccc

SEQ ID NO: 21797 - DNA, 20 bp, Artificial Sequence
  Chr21_6 Reverse Primer
tgggactggaggtcaagtgt

SEQ ID NO: 21798 - DNA, 20 bp, Artificial Sequence
  Chr21_6 Reverse Primer
cttgctgccaatgctcataa

SEQ ID NO: 21799 - DNA, 27 bp, Artificial Sequence
  Chr21_6 Reverse Primer
gacagacagacaaacataagtagatga

SEQ ID NO: 21800 - DNA, 20 bp, Artificial Sequence
  Chr21_6 Reverse Primer
gaactggaggcattctgagg

SEQ ID NO: 21801 - DNA, 20 bp, Artificial Sequence
  Chr21_6 Reverse Primer
agactcagggcttcctcctt

SEQ ID NO: 21802 - DNA, 20 bp, Artificial Sequence
  Chr21_6 Reverse Primer
ttattgcaatcagggcttcc

SEQ ID NO: 21803 - DNA, 20 bp, Artificial Sequence
  Chr21_6 Reverse Primer
ttacaccccaggacaagagc

SEQ ID NO: 21804 - DNA, 20 bp, Artificial Sequence
  Chr21_6 Reverse Primer
ttgctatgcgtgtgtggatt

SEQ ID NO: 21805 - DNA, 22 bp, Artificial Sequence
  Chr21_6 Reverse Primer
tggatctctcactctcagcaaa

SEQ ID NO: 21806 - DNA, 20 bp, Artificial Sequence
  Chr21_6 Reverse Primer
gggagtttagagagggtgcc

SEQ ID NO: 21807 - DNA, 20 bp, Artificial Sequence
  Chr21_6 Reverse Primer
taaggagctggcaaaggaaa

SEQ ID NO: 21808 - DNA, 20 bp, Artificial Sequence
  Chr21_6 Reverse Primer
aacgactgcagggaattgtc

SEQ ID NO: 21809 - DNA, 20 bp, Artificial Sequence
  Chr21_6 Reverse Primer
agaggatggaggtgcttgaa

SEQ ID NO: 21810 - DNA, 20 bp, Artificial Sequence
  Chr21_6 Reverse Primer
aattcatccccgtgtttcaa

SEQ ID NO: 21811 - DNA, 20 bp, Artificial Sequence
  Chr21_6 Reverse Primer
ccagactgacagcaccttga

SEQ ID NO: 21812 - DNA, 20 bp, Artificial Sequence
  Chr21_6 Reverse Primer
gagagcagagtcacatcccc

SEQ ID NO: 21813 - DNA, 20 bp, Artificial Sequence
  Chr21_6 Reverse Primer
gctgtagccaagggaaactg

SEQ ID NO: 21814 - DNA, 20 bp, Artificial Sequence
  Chr21_6 Reverse Primer
tcctctccttcttcctgcac

SEQ ID NO: 21815 - DNA, 20 bp, Artificial Sequence
  Chr21_6 Reverse Primer
ccccactgtgccctagttta

SEQ ID NO: 21816 - DNA, 20 bp, Artificial Sequence
  Chr21_6 Reverse Primer
aagcctccctcaacacacag

SEQ ID NO: 21817 - DNA, 20 bp, Artificial Sequence
  Chr21_6 Reverse Primer
cgcaaatcctaaataagccc

SEQ ID NO: 21818 - DNA, 20 bp, Artificial Sequence
  Chr21_6 Reverse Primer
catcccctctctgcagactc

SEQ ID NO: 21819 - DNA, 20 bp, Artificial Sequence
  Chr21_6 Reverse Primer
gactcagcctggctttgaac

SEQ ID NO: 21820 - DNA, 19 bp, Artificial Sequence
  Chr21_6 Reverse Primer
gcctttgcacctgtcaaga

SEQ ID NO: 21821 - DNA, 20 bp, Artificial Sequence
  Chr21_6 Reverse Primer
cagatgcagagaaagagggg

SEQ ID NO: 21822 - DNA, 20 bp, Artificial Sequence
  Chr21_6 Reverse Primer
cataggcgagaccaggtgtt

SEQ ID NO: 21823 - DNA, 20 bp, Artificial Sequence
  Chr21_6 Reverse Primer
caaatgtgggcatggatgta

SEQ ID NO: 21824 - DNA, 20 bp, Artificial Sequence
  Chr21_6 Reverse Primer
taggcttggggatttgttca

SEQ ID NO: 21825 - DNA, 20 bp, Artificial Sequence
  Chr21_6 Reverse Primer
gcttgccacaacctgataca

SEQ ID NO: 21826 - DNA, 20 bp, Artificial Sequence
  Chr21_6 Reverse Primer
attggaatgcagaggcagag

SEQ ID NO: 21827 - DNA, 20 bp, Artificial Sequence
  Chr21_6 Reverse Primer
agggctgaggacagtgtgat

SEQ ID NO: 21828 - DNA, 20 bp, Artificial Sequence
  Chr21_6 Reverse Primer
ggttgcaaacaaatcacacg

SEQ ID NO: 21829 - DNA, 20 bp, Artificial Sequence
  Chr21_6 Reverse Primer
tttctgctttaccaccccac

SEQ ID NO: 21830 - DNA, 20 bp, Artificial Sequence
  Chr21_6 Reverse Primer
gtggagagttgcagatgggt

SEQ ID NO: 21831 - DNA, 20 bp, Artificial Sequence
  Chr21_6 Reverse Primer
ttctccgtccatactcccag

SEQ ID NO: 21832 - DNA, 20 bp, Artificial Sequence
  Chr21_6 Reverse Primer
tgtgtgctggctaggagatg

SEQ ID NO: 21833 - DNA, 20 bp, Artificial Sequence
  Chr21_6 Reverse Primer
ttgtttgggaggttttctgg

SEQ ID NO: 21834 - DNA, 24 bp, Artificial Sequence
  Chr21_6 Reverse Primer
ggaaaggaaataactcttgatgga

SEQ ID NO: 21835 - DNA, 20 bp, Artificial Sequence
  Chr21_6 Reverse Primer
aaatgtgagcttcactgcga

SEQ ID NO: 21836 - DNA, 20 bp, Artificial Sequence
  Chr21_6 Reverse Primer
tacaattcccaaggaggcag

SEQ ID NO: 21837 - DNA, 20 bp, Artificial Sequence
  Chr21_6 Reverse Primer
gtccagaatgcttggaacct

SEQ ID NO: 21838 - DNA, 20 bp, Artificial Sequence
  Chr21_6 Reverse Primer
actagcacaggtgctgggag

SEQ ID NO: 21839 - DNA, 20 bp, Artificial Sequence
  Chr21_6 Reverse Primer
gagaaacaccccaggactga

SEQ ID NO: 21840 - DNA, 20 bp, Artificial Sequence
  Chr21_6 Reverse Primer
agttagcagttccagcccct

SEQ ID NO: 21841 - DNA, 20 bp, Artificial Sequence
  Chr21_6 Reverse Primer
tctcagaagcaaatgaccca

SEQ ID NO: 21842 - DNA, 20 bp, Artificial Sequence
  Chr21_6 Reverse Primer
tcaagggactctgtgcctct

SEQ ID NO: 21843 - DNA, 20 bp, Artificial Sequence
  Chr21_6 Reverse Primer
acttttgcaaggaaaggcag

SEQ ID NO: 21844 - DNA, 20 bp, Artificial Sequence
  Chr21_6 Reverse Primer
ggtagcctggatctgcttca

SEQ ID NO: 21845 - DNA, 20 bp, Artificial Sequence
  Chr21_7 Forward Primer
gggcatgatgacttccagtt

SEQ ID NO: 21846 - DNA, 20 bp, Artificial Sequence
  Chr21_7 Forward Primer
ggctccatgtgagagtaggg

SEQ ID NO: 21847 - DNA, 20 bp, Artificial Sequence
  Chr21_7 Forward Primer
ttgctgttgccaagtacagc

SEQ ID NO: 21848 - DNA, 20 bp, Artificial Sequence
  Chr21_7 Forward Primer
agctgtcactcccattggtc

SEQ ID NO: 21849 - DNA, 20 bp, Artificial Sequence
  Chr21_7 Forward Primer
gctgagttcaccaaagctcc

SEQ ID NO: 21850 - DNA, 19 bp, Artificial Sequence
  Chr21_7 Forward Primer
gtgaaaggagatgcccagg

SEQ ID NO: 21851 - DNA, 20 bp, Artificial Sequence
  Chr21_7 Forward Primer
gtttgtgacctgtcacctgg

SEQ ID NO: 21852 - DNA, 20 bp, Artificial Sequence
  Chr21_7 Forward Primer
cagctgcttcctctttcagg

SEQ ID NO: 21853 - DNA, 20 bp, Artificial Sequence
  Chr21_7 Forward Primer
accctgtgtgtcctccagaa

SEQ ID NO: 21854 - DNA, 20 bp, Artificial Sequence
  Chr21_7 Forward Primer
ctgtccaacaacagcacctg

SEQ ID NO: 21855 - DNA, 20 bp, Artificial Sequence
  Chr21_7 Forward Primer
ctgtgacctctccctgtggt

SEQ ID NO: 21856 - DNA, 19 bp, Artificial Sequence
  Chr21_7 Forward Primer
gtgtaccatgcgtgtgggt

SEQ ID NO: 21857 - DNA, 19 bp, Artificial Sequence
  Chr21_7 Forward Primer
ctcaggaactcagcccacc

SEQ ID NO: 21858 - DNA, 20 bp, Artificial Sequence
  Chr21_7 Forward Primer
acatcagtagccttcctcgg

SEQ ID NO: 21859 - DNA, 20 bp, Artificial Sequence
  Chr21_7 Forward Primer
cacctcctctaccccaactg

SEQ ID NO: 21860 - DNA, 18 bp, Artificial Sequence
  Chr21_7 Forward Primer
ctcccatgaccatcccag

SEQ ID NO: 21861 - DNA, 20 bp, Artificial Sequence
  Chr21_7 Forward Primer
tgcctctagggtccagctta

SEQ ID NO: 21862 - DNA, 20 bp, Artificial Sequence
  Chr21_7 Forward Primer
ctttgcagtgggggtaaaaa

SEQ ID NO: 21863 - DNA, 20 bp, Artificial Sequence
  Chr21_7 Forward Primer
cagtacaacgtggtggatgg

SEQ ID NO: 21864 - DNA, 20 bp, Artificial Sequence
  Chr21_7 Forward Primer
tgtctgtgtacgtggggatg

SEQ ID NO: 21865 - DNA, 20 bp, Artificial Sequence
  Chr21_7 Forward Primer
tgcagaatgctctggaacag

SEQ ID NO: 21866 - DNA, 20 bp, Artificial Sequence
  Chr21_7 Forward Primer
atgcaccatgcttctgttgt

SEQ ID NO: 21867 - DNA, 21 bp, Artificial Sequence
  Chr21_7 Forward Primer
aacaggcttccttgtttctga

SEQ ID NO: 21868 - DNA, 20 bp, Artificial Sequence
  Chr21_7 Forward Primer
gttgagccatccttgcattc

SEQ ID NO: 21869 - DNA, 20 bp, Artificial Sequence
  Chr21_7 Forward Primer
tcctgtttcttcttgggtcc

SEQ ID NO: 21870 - DNA, 21 bp, Artificial Sequence
  Chr21_7 Forward Primer
ttcgatctcatccatttttgc

SEQ ID NO: 21871 - DNA, 20 bp, Artificial Sequence
  Chr21_7 Forward Primer
tgcctttcaaggacctcatc

SEQ ID NO: 21872 - DNA, 20 bp, Artificial Sequence
  Chr21_7 Forward Primer
tggagctgagtggatgagtg

SEQ ID NO: 21873 - DNA, 20 bp, Artificial Sequence
  Chr21_7 Forward Primer
agcaagggtgcagagtgttt

SEQ ID NO: 21874 - DNA, 20 bp, Artificial Sequence
  Chr21_7 Forward Primer
gagtgcaggaaggagaatgg

SEQ ID NO: 21875 - DNA, 20 bp, Artificial Sequence
  Chr21_7 Forward Primer
gctgctgaggggtaacagag

SEQ ID NO: 21876 - DNA, 20 bp, Artificial Sequence
  Chr21_7 Forward Primer
aggtcagagtggaatggtgg

SEQ ID NO: 21877 - DNA, 20 bp, Artificial Sequence
  Chr21_7 Forward Primer
ctgctggggaccttctgtag

SEQ ID NO: 21878 - DNA, 20 bp, Artificial Sequence
  Chr21_7 Forward Primer
cgagttaacccagagccttg

SEQ ID NO: 21879 - DNA, 19 bp, Artificial Sequence
  Chr21_7 Forward Primer
gacccaaccacacgctgta

SEQ ID NO: 21880 - DNA, 20 bp, Artificial Sequence
  Chr21_7 Forward Primer
ccattcacacacagggacac

SEQ ID NO: 21881 - DNA, 20 bp, Artificial Sequence
  Chr21_7 Forward Primer
tctcacccagtggcttctct

SEQ ID NO: 21882 - DNA, 20 bp, Artificial Sequence
  Chr21_7 Forward Primer
cacctcactggattcccact

SEQ ID NO: 21883 - DNA, 20 bp, Artificial Sequence
  Chr21_7 Forward Primer
aagatgctggaagtgctggt

SEQ ID NO: 21884 - DNA, 20 bp, Artificial Sequence
  Chr21_7 Forward Primer
tcctcctcccttttcctcat

SEQ ID NO: 21885 - DNA, 20 bp, Artificial Sequence
  Chr21_7 Forward Primer
ataggacggtgtcatccagg

SEQ ID NO: 21886 - DNA, 19 bp, Artificial Sequence
  Chr21_7 Forward Primer
tgctgtgggagtgtgtgtg

SEQ ID NO: 21887 - DNA, 20 bp, Artificial Sequence
  Chr21_7 Forward Primer
gtggcctgcaaagtcttcat

SEQ ID NO: 21888 - DNA, 20 bp, Artificial Sequence
  Chr21_7 Forward Primer
aatgtcactgcagcctgaga

SEQ ID NO: 21889 - DNA, 20 bp, Artificial Sequence
  Chr21_7 Forward Primer
ggaggtattcctggcctgtt

SEQ ID NO: 21890 - DNA, 18 bp, Artificial Sequence
  Chr21_7 Forward Primer
cacatccacccttgcctc

SEQ ID NO: 21891 - DNA, 20 bp, Artificial Sequence
  Chr21_7 Forward Primer
gtgcagccaccacctctatc

SEQ ID NO: 21892 - DNA, 20 bp, Artificial Sequence
  Chr21_7 Forward Primer
ctgtgtgtgctggaagctgt

SEQ ID NO: 21893 - DNA, 20 bp, Artificial Sequence
  Chr21_7 Forward Primer
gccctgtgtagttctgggac

SEQ ID NO: 21894 - DNA, 20 bp, Artificial Sequence
  Chr21_7 Forward Primer
agctgcacctgcatcttctt

SEQ ID NO: 21895 - DNA, 20 bp, Artificial Sequence
  Chr21_7 Forward Primer
tccagtccatagacgttccc

SEQ ID NO: 21896 - DNA, 20 bp, Artificial Sequence
  Chr21_7 Forward Primer
atccaccatggaggtcattg

SEQ ID NO: 21897 - DNA, 20 bp, Artificial Sequence
  Chr21_7 Forward Primer
ctctccctccctactccctg

SEQ ID NO: 21898 - DNA, 20 bp, Artificial Sequence
  Chr21_7 Forward Primer
ttttcctaaacctgggctcc

SEQ ID NO: 21899 - DNA, 20 bp, Artificial Sequence
  Chr21_7 Forward Primer
caaggacacaactgacccct

SEQ ID NO: 21900 - DNA, 20 bp, Artificial Sequence
  Chr21_7 Forward Primer
tgtgctcagtgctcctgttt

SEQ ID NO: 21901 - DNA, 20 bp, Artificial Sequence
  Chr21_7 Forward Primer
cgtagacactcacacggctg

SEQ ID NO: 21902 - DNA, 20 bp, Artificial Sequence
  Chr21_7 Forward Primer
ctcttcgaaccaaatgggaa

SEQ ID NO: 21903 - DNA, 20 bp, Artificial Sequence
  Chr21_7 Forward Primer
gggcagaacaaacagcaaat

SEQ ID NO: 21904 - DNA, 20 bp, Artificial Sequence
  Chr21_7 Forward Primer
ccactgttattttgggtgcc

SEQ ID NO: 21905 - DNA, 20 bp, Artificial Sequence
  Chr21_7 Forward Primer
aagaacgaacttgtgcctgg

SEQ ID NO: 21906 - DNA, 22 bp, Artificial Sequence
  Chr21_7 Forward Primer
agaagaacaggattgatgggag

SEQ ID NO: 21907 - DNA, 20 bp, Artificial Sequence
  Chr21_7 Forward Primer
ctgtgaggtgtgagcatgtg

SEQ ID NO: 21908 - DNA, 20 bp, Artificial Sequence
  Chr21_7 Forward Primer
gaggaagaatcagacgctgg

SEQ ID NO: 21909 - DNA, 20 bp, Artificial Sequence
  Chr21_7 Forward Primer
taaccacgcatgtaagtggc

SEQ ID NO: 21910 - DNA, 20 bp, Artificial Sequence
  Chr21_7 Forward Primer
gtctgtgtgcctgtctgcat

SEQ ID NO: 21911 - DNA, 20 bp, Artificial Sequence
  Chr21_7 Forward Primer
aacactctccagccacaacc

SEQ ID NO: 21912 - DNA, 20 bp, Artificial Sequence
  Chr21_7 Forward Primer
actgggagagtggaggctgt

SEQ ID NO: 21913 - DNA, 21 bp, Artificial Sequence
  Chr21_7 Forward Primer
tctgagagaatgagagggtgc

SEQ ID NO: 21914 - DNA, 20 bp, Artificial Sequence
  Chr21_7 Forward Primer
cgactcagagcaagggaaag

SEQ ID NO: 21915 - DNA, 20 bp, Artificial Sequence
  Chr21_7 Forward Primer
caaagccactgaggaccaat

SEQ ID NO: 21916 - DNA, 20 bp, Artificial Sequence
  Chr21_7 Forward Primer
gccgctctgtctctctgagt

SEQ ID NO: 21917 - DNA, 20 bp, Artificial Sequence
  Chr21_7 Forward Primer
aggaggaggcttctggtgtt

SEQ ID NO: 21918 - DNA, 20 bp, Artificial Sequence
  Chr21_7 Forward Primer
aaccagcacccagtcatctc

SEQ ID NO: 21919 - DNA, 20 bp, Artificial Sequence
  Chr21_7 Forward Primer
tcttacagtgtgcctgaccg

SEQ ID NO: 21920 - DNA, 20 bp, Artificial Sequence
  Chr21_7 Forward Primer
catcaaagccagaatcaccc

SEQ ID NO: 21921 - DNA, 20 bp, Artificial Sequence
  Chr21_7 Forward Primer
aaaccatgaggatggctcag

SEQ ID NO: 21922 - DNA, 20 bp, Artificial Sequence
  Chr21_7 Forward Primer
tgccacaattactcccacaa

SEQ ID NO: 21923 - DNA, 20 bp, Artificial Sequence
  Chr21_7 Forward Primer
gggtctaaaggctggaggtc

SEQ ID NO: 21924 - DNA, 18 bp, Artificial Sequence
  Chr21_7 Forward Primer
ctgctggagtagcccctg

SEQ ID NO: 21925 - DNA, 20 bp, Artificial Sequence
  Chr21_7 Forward Primer
ctgtttaaggaggcgtgctc

SEQ ID NO: 21926 - DNA, 18 bp, Artificial Sequence
  Chr21_7 Forward Primer
gaaaccagctccatcccc

SEQ ID NO: 21927 - DNA, 20 bp, Artificial Sequence
  Chr21_7 Forward Primer
aacaagatctcccacctccc

SEQ ID NO: 21928 - DNA, 19 bp, Artificial Sequence
  Chr21_7 Forward Primer
gtgggagctgaagctggac

SEQ ID NO: 21929 - DNA, 20 bp, Artificial Sequence
  Chr21_7 Forward Primer
gaggcacctggagtacctga

SEQ ID NO: 21930 - DNA, 20 bp, Artificial Sequence
  Chr21_7 Forward Primer
cgtgacgataccatcaggaa

SEQ ID NO: 21931 - DNA, 20 bp, Artificial Sequence
  Chr21_7 Forward Primer
cattggaacgtaagccctgt

SEQ ID NO: 21932 - DNA, 21 bp, Artificial Sequence
  Chr21_7 Forward Primer
tccagcaacaggaactctctc

SEQ ID NO: 21933 - DNA, 20 bp, Artificial Sequence
  Chr21_7 Forward Primer
tgtgttgtgaggtgcttggt

SEQ ID NO: 21934 - DNA, 20 bp, Artificial Sequence
  Chr21_7 Forward Primer
cgtggctgaaagcataggat

SEQ ID NO: 21935 - DNA, 20 bp, Artificial Sequence
  Chr21_7 Forward Primer
ccctagaatcagcccagaca

SEQ ID NO: 21936 - DNA, 20 bp, Artificial Sequence
  Chr21_7 Forward Primer
agcacctcccctctaaggaa

SEQ ID NO: 21937 - DNA, 20 bp, Artificial Sequence
  Chr21_7 Forward Primer
gactcagttctttgcagccc

SEQ ID NO: 21938 - DNA, 20 bp, Artificial Sequence
  Chr21_7 Forward Primer
gggataggaaattgggggta

SEQ ID NO: 21939 - DNA, 20 bp, Artificial Sequence
  Chr21_7 Forward Primer
acccagccctaactccaact

SEQ ID NO: 21940 - DNA, 20 bp, Artificial Sequence
  Chr21_7 Forward Primer
agctgtgggtgagtgaggag

SEQ ID NO: 21941 - DNA, 20 bp, Artificial Sequence
  Chr21_7 Reverse Primer
catgacacaacccacaaacc

SEQ ID NO: 21942 - DNA, 22 bp, Artificial Sequence
  Chr21_7 Reverse Primer
tctgtaagtggaccatcagagc

SEQ ID NO: 21943 - DNA, 20 bp, Artificial Sequence
  Chr21_7 Reverse Primer
atgagcccttaacacatgcc

SEQ ID NO: 21944 - DNA, 20 bp, Artificial Sequence
  Chr21_7 Reverse Primer
ttatggcaccccacactcat

SEQ ID NO: 21945 - DNA, 20 bp, Artificial Sequence
  Chr21_7 Reverse Primer
tgcttaatcccacaaaagcc

SEQ ID NO: 21946 - DNA, 20 bp, Artificial Sequence
  Chr21_7 Reverse Primer
aaacccgagtctccagctct

SEQ ID NO: 21947 - DNA, 20 bp, Artificial Sequence
  Chr21_7 Reverse Primer
gtgtcagcctttgcttcctc

SEQ ID NO: 21948 - DNA, 20 bp, Artificial Sequence
  Chr21_7 Reverse Primer
actcctcagagccctccttc

SEQ ID NO: 21949 - DNA, 20 bp, Artificial Sequence
  Chr21_7 Reverse Primer
aggccgtctctaagtcctcc

SEQ ID NO: 21950 - DNA, 19 bp, Artificial Sequence
  Chr21_7 Reverse Primer
atggccaagacaggggtag

SEQ ID NO: 21951 - DNA, 20 bp, Artificial Sequence
  Chr21_7 Reverse Primer
agtgagacaccacgtcctcc

SEQ ID NO: 21952 - DNA, 20 bp, Artificial Sequence
  Chr21_7 Reverse Primer
accccagacccaaaagaaac

SEQ ID NO: 21953 - DNA, 20 bp, Artificial Sequence
  Chr21_7 Reverse Primer
tttgcttctcgtcactcagc

SEQ ID NO: 21954 - DNA, 20 bp, Artificial Sequence
  Chr21_7 Reverse Primer
cgaacaccagctctgaagtg

SEQ ID NO: 21955 - DNA, 20 bp, Artificial Sequence
  Chr21_7 Reverse Primer
tcaaatgtcaaacaggggct

SEQ ID NO: 21956 - DNA, 20 bp, Artificial Sequence
  Chr21_7 Reverse Primer
gataggccagagagaagccc

SEQ ID NO: 21957 - DNA, 19 bp, Artificial Sequence
  Chr21_7 Reverse Primer
gaccccaacatcccaacat

SEQ ID NO: 21958 - DNA, 20 bp, Artificial Sequence
  Chr21_7 Reverse Primer
ctgactgggattctcaaggg

SEQ ID NO: 21959 - DNA, 20 bp, Artificial Sequence
  Chr21_7 Reverse Primer
tgttttcttcctttcggtgg

SEQ ID NO: 21960 - DNA, 20 bp, Artificial Sequence
  Chr21_7 Reverse Primer
ggtgctcacaggacacttga

SEQ ID NO: 21961 - DNA, 20 bp, Artificial Sequence
  Chr21_7 Reverse Primer
ctcctcgtcagcttcccata

SEQ ID NO: 21962 - DNA, 20 bp, Artificial Sequence
  Chr21_7 Reverse Primer
cacaaaataaatcaggcccc

SEQ ID NO: 21963 - DNA, 20 bp, Artificial Sequence
  Chr21_7 Reverse Primer
ttggctaaaggggaaacatc

SEQ ID NO: 21964 - DNA, 20 bp, Artificial Sequence
  Chr21_7 Reverse Primer
ggaaagctgaccagctcatt

SEQ ID NO: 21965 - DNA, 21 bp, Artificial Sequence
  Chr21_7 Reverse Primer
gccactggcaagaataatcaa

SEQ ID NO: 21966 - DNA, 25 bp, Artificial Sequence
  Chr21_7 Reverse Primer
aaaaataaaatccctacacatcaaa

SEQ ID NO: 21967 - DNA, 20 bp, Artificial Sequence
  Chr21_7 Reverse Primer
gggttgaacaaggcagaatc

SEQ ID NO: 21968 - DNA, 20 bp, Artificial Sequence
  Chr21_7 Reverse Primer
cactgtgccctgatctctga

SEQ ID NO: 21969 - DNA, 20 bp, Artificial Sequence
  Chr21_7 Reverse Primer
tgcattggtcaagaagctca

SEQ ID NO: 21970 - DNA, 20 bp, Artificial Sequence
  Chr21_7 Reverse Primer
ccagaagctgctcagaaacc

SEQ ID NO: 21971 - DNA, 20 bp, Artificial Sequence
  Chr21_7 Reverse Primer
ctccatcctcctgagtctgc

SEQ ID NO: 21972 - DNA, 18 bp, Artificial Sequence
  Chr21_7 Reverse Primer
tcccaacaccagtgtccc

SEQ ID NO: 21973 - DNA, 20 bp, Artificial Sequence
  Chr21_7 Reverse Primer
ccagcagagtgtgctaacca

SEQ ID NO: 21974 - DNA, 20 bp, Artificial Sequence
  Chr21_7 Reverse Primer
gcagaggggttgagtcagtc

SEQ ID NO: 21975 - DNA, 20 bp, Artificial Sequence
  Chr21_7 Reverse Primer
tttcgggcatattcacgttt

SEQ ID NO: 21976 - DNA, 19 bp, Artificial Sequence
  Chr21_7 Reverse Primer
cagagagcacagggcacag

SEQ ID NO: 21977 - DNA, 19 bp, Artificial Sequence
  Chr21_7 Reverse Primer
gttgacatgggggtgacat

SEQ ID NO: 21978 - DNA, 20 bp, Artificial Sequence
  Chr21_7 Reverse Primer
tcaagttcttcatccccagg

SEQ ID NO: 21979 - DNA, 18 bp, Artificial Sequence
  Chr21_7 Reverse Primer
acaaaacaggcggggtct

SEQ ID NO: 21980 - DNA, 20 bp, Artificial Sequence
  Chr21_7 Reverse Primer
ctgaaggtcaggagctggtt

SEQ ID NO: 21981 - DNA, 20 bp, Artificial Sequence
  Chr21_7 Reverse Primer
tgttggaggcacttgaacag

SEQ ID NO: 21982 - DNA, 20 bp, Artificial Sequence
  Chr21_7 Reverse Primer
ggcagagaagctactgggtg

SEQ ID NO: 21983 - DNA, 20 bp, Artificial Sequence
  Chr21_7 Reverse Primer
ctgtttgcattcccgtctct

SEQ ID NO: 21984 - DNA, 19 bp, Artificial Sequence
  Chr21_7 Reverse Primer
gaggatccgcttcagcttc

SEQ ID NO: 21985 - DNA, 20 bp, Artificial Sequence
  Chr21_7 Reverse Primer
ctgcacacagctatgcttcc

SEQ ID NO: 21986 - DNA, 20 bp, Artificial Sequence
  Chr21_7 Reverse Primer
agagctggagatggaggctt

SEQ ID NO: 21987 - DNA, 20 bp, Artificial Sequence
  Chr21_7 Reverse Primer
gagatcttggaaacgccttg

SEQ ID NO: 21988 - DNA, 20 bp, Artificial Sequence
  Chr21_7 Reverse Primer
ttcagctccacgtcattctg

SEQ ID NO: 21989 - DNA, 20 bp, Artificial Sequence
  Chr21_7 Reverse Primer
aaagcccggggttatttatg

SEQ ID NO: 21990 - DNA, 20 bp, Artificial Sequence
  Chr21_7 Reverse Primer
ttctggaagaacaagggcac

SEQ ID NO: 21991 - DNA, 20 bp, Artificial Sequence
  Chr21_7 Reverse Primer
agctctgagtagcctgtgcc

SEQ ID NO: 21992 - DNA, 20 bp, Artificial Sequence
  Chr21_7 Reverse Primer
ctgtacccccacggagttta

SEQ ID NO: 21993 - DNA, 20 bp, Artificial Sequence
  Chr21_7 Reverse Primer
gtggaaagcacagaagagcc

SEQ ID NO: 21994 - DNA, 20 bp, Artificial Sequence
  Chr21_7 Reverse Primer
gtcaggtggaagacagaggc

SEQ ID NO: 21995 - DNA, 20 bp, Artificial Sequence
  Chr21_7 Reverse Primer
aggctgctttgtggttcaaa

SEQ ID NO: 21996 - DNA, 20 bp, Artificial Sequence
  Chr21_7 Reverse Primer
cgtgtcatgggtgtttcaag

SEQ ID NO: 21997 - DNA, 20 bp, Artificial Sequence
  Chr21_7 Reverse Primer
tccctctacaaaaggaggca

SEQ ID NO: 21998 - DNA, 20 bp, Artificial Sequence
  Chr21_7 Reverse Primer
cggtcctgagtggacttcat

SEQ ID NO: 21999 - DNA, 20 bp, Artificial Sequence
  Chr21_7 Reverse Primer
ccacccagatcttgctcact

SEQ ID NO: 22000 - DNA, 20 bp, Artificial Sequence
  Chr21_7 Reverse Primer
gacgtactgcccttttctcg

SEQ ID NO: 22001 - DNA, 20 bp, Artificial Sequence
  Chr21_7 Reverse Primer
gttggaatgtctggcttcgt

SEQ ID NO: 22002 - DNA, 21 bp, Artificial Sequence
  Chr21_7 Reverse Primer
aaatctttccttttgccctca

SEQ ID NO: 22003 - DNA, 20 bp, Artificial Sequence
  Chr21_7 Reverse Primer
gctgccttcacaagtctcct

SEQ ID NO: 22004 - DNA, 20 bp, Artificial Sequence
  Chr21_7 Reverse Primer
ctgtttcctgccattttggt

SEQ ID NO: 22005 - DNA, 21 bp, Artificial Sequence
  Chr21_7 Reverse Primer
aaggacaaacttagccttccg

SEQ ID NO: 22006 - DNA, 20 bp, Artificial Sequence
  Chr21_7 Reverse Primer
gcacatgcagatgtgtctga

SEQ ID NO: 22007 - DNA, 20 bp, Artificial Sequence
  Chr21_7 Reverse Primer
gacagaagcccctcacagag

SEQ ID NO: 22008 - DNA, 20 bp, Artificial Sequence
  Chr21_7 Reverse Primer
tcatgtctcatttctccccc

SEQ ID NO: 22009 - DNA, 21 bp, Artificial Sequence
  Chr21_7 Reverse Primer
ccgacattgtcttcatcttca

SEQ ID NO: 22010 - DNA, 20 bp, Artificial Sequence
  Chr21_7 Reverse Primer
gaccggttatgttccctcct

SEQ ID NO: 22011 - DNA, 19 bp, Artificial Sequence
  Chr21_7 Reverse Primer
acactcgtccctcctgacc

SEQ ID NO: 22012 - DNA, 20 bp, Artificial Sequence
  Chr21_7 Reverse Primer
agctgctccagctggttaat

SEQ ID NO: 22013 - DNA, 20 bp, Artificial Sequence
  Chr21_7 Reverse Primer
ctcttcccggtgttcacagt

SEQ ID NO: 22014 - DNA, 20 bp, Artificial Sequence
  Chr21_7 Reverse Primer
cactgcagcgtagacaggaa

SEQ ID NO: 22015 - DNA, 20 bp, Artificial Sequence
  Chr21_7 Reverse Primer
tgtgtgctgattcttccctg

SEQ ID NO: 22016 - DNA, 20 bp, Artificial Sequence
  Chr21_7 Reverse Primer
ggcacacccaaactgagaga

SEQ ID NO: 22017 - DNA, 20 bp, Artificial Sequence
  Chr21_7 Reverse Primer
cctctggcatcaggacttct

SEQ ID NO: 22018 - DNA, 20 bp, Artificial Sequence
  Chr21_7 Reverse Primer
gcatgtaaggagaccggaac

SEQ ID NO: 22019 - DNA, 20 bp, Artificial Sequence
  Chr21_7 Reverse Primer
gtcataacccagcaagccct

SEQ ID NO: 22020 - DNA, 18 bp, Artificial Sequence
  Chr21_7 Reverse Primer
ctggccacctacagcacc

SEQ ID NO: 22021 - DNA, 19 bp, Artificial Sequence
  Chr21_7 Reverse Primer
ccaaccagacatgaaaccg

SEQ ID NO: 22022 - DNA, 20 bp, Artificial Sequence
  Chr21_7 Reverse Primer
aagctgcagaagacagccac

SEQ ID NO: 22023 - DNA, 20 bp, Artificial Sequence
  Chr21_7 Reverse Primer
gttgtgggacaggcgtatct

SEQ ID NO: 22024 - DNA, 20 bp, Artificial Sequence
  Chr21_7 Reverse Primer
gtacacgacgtaggcgatca

SEQ ID NO: 22025 - DNA, 20 bp, Artificial Sequence
  Chr21_7 Reverse Primer
ctgtgcctgagtgcaacagt

SEQ ID NO: 22026 - DNA, 20 bp, Artificial Sequence
  Chr21_7 Reverse Primer
ggacttatcagcgccttcag

SEQ ID NO: 22027 - DNA, 20 bp, Artificial Sequence
  Chr21_7 Reverse Primer
agctaccctggacttttccc

SEQ ID NO: 22028 - DNA, 21 bp, Artificial Sequence
  Chr21_7 Reverse Primer
tgatcactcatttacaccccc

SEQ ID NO: 22029 - DNA, 20 bp, Artificial Sequence
  Chr21_7 Reverse Primer
agctctcactggaagggtga

SEQ ID NO: 22030 - DNA, 20 bp, Artificial Sequence
  Chr21_7 Reverse Primer
ttcacactctccttgggacc

SEQ ID NO: 22031 - DNA, 20 bp, Artificial Sequence
  Chr21_7 Reverse Primer
gtgtcctcctggtcctctcc

SEQ ID NO: 22032 - DNA, 20 bp, Artificial Sequence
  Chr21_7 Reverse Primer
ggtcacaagatgggagagga

SEQ ID NO: 22033 - DNA, 20 bp, Artificial Sequence
  Chr21_7 Reverse Primer
tgagacattccctttgtccc

SEQ ID NO: 22034 - DNA, 20 bp, Artificial Sequence
  Chr21_7 Reverse Primer
gggatggtttaggggttagc

SEQ ID NO: 22035 - DNA, 20 bp, Artificial Sequence
  Chr21_7 Reverse Primer
ctgtggatcaggatggctct

SEQ ID NO: 22036 - DNA, 20 bp, Artificial Sequence
  Chr21_7 Reverse Primer
acatgtccaggtttagccca

SEQ ID NO: 22037 - DNA, 22 bp, Artificial Sequence
  ALK Forward Primer
tcaaagcacttggaatgtatgc

SEQ ID NO: 22038 - DNA, 20 bp, Artificial Sequence
  ALK Forward Primer
ccacatctgggccttgtatt

SEQ ID NO: 22039 - DNA, 20 bp, Artificial Sequence
  ALK Forward Primer
tcctcgtaatgaccagctcc

SEQ ID NO: 22040 - DNA, 20 bp, Artificial Sequence
  ALK Forward Primer
agatctctgcagctgtgggt

SEQ ID NO: 22041 - DNA, 22 bp, Artificial Sequence
  ALK Forward Primer
tgccgtaggggaaattattaaa

SEQ ID NO: 22042 - DNA, 20 bp, Artificial Sequence
  ALK Forward Primer
aggaaaagctttgcagagga

SEQ ID NO: 22043 - DNA, 20 bp, Artificial Sequence
  ALK Forward Primer
atgctgaagtgctgtgagga

SEQ ID NO: 22044 - DNA, 25 bp, Artificial Sequence
  ALK Forward Primer
cattctttagttccctctgtgtttt

SEQ ID NO: 22045 - DNA, 20 bp, Artificial Sequence
  ALK Forward Primer
agaggagagcatcggacaga

SEQ ID NO: 22046 - DNA, 20 bp, Artificial Sequence
  ALK Forward Primer
aggaacccacaggattgcta

SEQ ID NO: 22047 - DNA, 20 bp, Artificial Sequence
  ALK Forward Primer
tttctccagccaggctctaa

SEQ ID NO: 22048 - DNA, 20 bp, Artificial Sequence
  ALK Forward Primer
tgtcttcaggctgatgttgc

SEQ ID NO: 22049 - DNA, 20 bp, Artificial Sequence
  ALK Forward Primer
gccactttggggacagaata

SEQ ID NO: 22050 - DNA, 20 bp, Artificial Sequence
  ALK Forward Primer
cagtcacattcgcatcttgg

SEQ ID NO: 22051 - DNA, 20 bp, Artificial Sequence
  ALK Forward Primer
aacattttccatgccagtcc

SEQ ID NO: 22052 - DNA, 21 bp, Artificial Sequence
  ALK Forward Primer
acaatcttcccttcaccaaag

SEQ ID NO: 22053 - DNA, 21 bp, Artificial Sequence
  ALK Forward Primer
tttgtctgcttcttgcattga

SEQ ID NO: 22054 - DNA, 22 bp, Artificial Sequence
  ALK Forward Primer
aacaagaaactggcagtaaggc

SEQ ID NO: 22055 - DNA, 20 bp, Artificial Sequence
  ALK Forward Primer
ctcagctagcaatgtgcagg

SEQ ID NO: 22056 - DNA, 20 bp, Artificial Sequence
  ALK Forward Primer
agctcctcctctttctgcct

SEQ ID NO: 22057 - DNA, 20 bp, Artificial Sequence
  ALK Forward Primer
ttaaacaatgcgtgaaagcg

SEQ ID NO: 22058 - DNA, 21 bp, Artificial Sequence
  ALK Forward Primer
tgtcaggtctctccactgtga

SEQ ID NO: 22059 - DNA, 27 bp, Artificial Sequence
  ALK Forward Primer
ttcctttttatatgtgtgttttcttca

SEQ ID NO: 22060 - DNA, 20 bp, Artificial Sequence
  ALK Forward Primer
gagaaccactgttgtcgggt

SEQ ID NO: 22061 - DNA, 20 bp, Artificial Sequence
  ALK Forward Primer
aaacaaaccacgagaggcat

SEQ ID NO: 22062 - DNA, 20 bp, Artificial Sequence
  ALK Forward Primer
agacagctgtgtggatgctg

SEQ ID NO: 22063 - DNA, 20 bp, Artificial Sequence
  ALK Forward Primer
caggtactctgccatgtgct

SEQ ID NO: 22064 - DNA, 20 bp, Artificial Sequence
  ALK Forward Primer
cttagggtggttgaagcctg

SEQ ID NO: 22065 - DNA, 20 bp, Artificial Sequence
  ALK Forward Primer
acatcttccacatgctgctg

SEQ ID NO: 22066 - DNA, 20 bp, Artificial Sequence
  ALK Forward Primer
atctcctggggtggctaaag

SEQ ID NO: 22067 - DNA, 20 bp, Artificial Sequence
  ALK Forward Primer
ctgaggtggaagagacaggc

SEQ ID NO: 22068 - DNA, 20 bp, Artificial Sequence
  ALK Forward Primer
ggggcaaccataatgaaatg

SEQ ID NO: 22069 - DNA, 20 bp, Artificial Sequence
  ALK Forward Primer
cccttgctaagctacatggc

SEQ ID NO: 22070 - DNA, 20 bp, Artificial Sequence
  ALK Forward Primer
aaggtcctgtgcaggaaaaa

SEQ ID NO: 22071 - DNA, 20 bp, Artificial Sequence
  ALK Forward Primer
tgcccccataaaaccataaa

SEQ ID NO: 22072 - DNA, 20 bp, Artificial Sequence
  ALK Forward Primer
catgtggatctggtgaggaa

SEQ ID NO: 22073 - DNA, 22 bp, Artificial Sequence
  ALK Forward Primer
ccttcttgatttggtgtttgac

SEQ ID NO: 22074 - DNA, 20 bp, Artificial Sequence
  ALK Forward Primer
gaaatgatccctcagccaga

SEQ ID NO: 22075 - DNA, 20 bp, Artificial Sequence
  ALK Forward Primer
tgggtacaatgcaaaggaca

SEQ ID NO: 22076 - DNA, 20 bp, Artificial Sequence
  ALK Forward Primer
gctgggattacaggcatgat

SEQ ID NO: 22077 - DNA, 20 bp, Artificial Sequence
  ALK Forward Primer
cacagcatgatgtcccagtc

SEQ ID NO: 22078 - DNA, 20 bp, Artificial Sequence
  ALK Forward Primer
gagcccagttttctatggca

SEQ ID NO: 22079 - DNA, 20 bp, Artificial Sequence
  ALK Forward Primer
agcacacagatcagcgacag

SEQ ID NO: 22080 - DNA, 20 bp, Artificial Sequence
  ALK Forward Primer
gaacatgcagctacaccagg

SEQ ID NO: 22081 - DNA, 20 bp, Artificial Sequence
  ALK Forward Primer
gcacattctctcaccccaat

SEQ ID NO: 22082 - DNA, 20 bp, Artificial Sequence
  ALK Forward Primer
atcccatcttggcctctctt

SEQ ID NO: 22083 - DNA, 20 bp, Artificial Sequence
  ALK Forward Primer
catacctccccaagaaagca

SEQ ID NO: 22084 - DNA, 20 bp, Artificial Sequence
  ALK Forward Primer
tggaggtttttctctgccat

SEQ ID NO: 22085 - DNA, 20 bp, Artificial Sequence
  ALK Forward Primer
aacgatgagaaggctgagga

SEQ ID NO: 22086 - DNA, 19 bp, Artificial Sequence
  ALK Forward Primer
cacacttcagtggcccatc

SEQ ID NO: 22087 - DNA, 20 bp, Artificial Sequence
  ALK Forward Primer
aaatggctccttgtgtttgg

SEQ ID NO: 22088 - DNA, 20 bp, Artificial Sequence
  ALK Forward Primer
gcatgctctctgtccctacc

SEQ ID NO: 22089 - DNA, 20 bp, Artificial Sequence
  ALK Forward Primer
gtgtggtgtgtgtctgggag

SEQ ID NO: 22090 - DNA, 20 bp, Artificial Sequence
  ALK Forward Primer
ggcaggaagtgaggacagag

SEQ ID NO: 22091 - DNA, 20 bp, Artificial Sequence
  ALK Forward Primer
ctgctgccacaaacacatct

SEQ ID NO: 22092 - DNA, 20 bp, Artificial Sequence
  ALK Forward Primer
tgcaaagtccctctcctttg

SEQ ID NO: 22093 - DNA, 20 bp, Artificial Sequence
  ALK Forward Primer
cagaggggaccactggataa

SEQ ID NO: 22094 - DNA, 20 bp, Artificial Sequence
  ALK Forward Primer
ctttatctccctgctccctg

SEQ ID NO: 22095 - DNA, 20 bp, Artificial Sequence
  ALK Forward Primer
agtcttccctcctttcctgg

SEQ ID NO: 22096 - DNA, 20 bp, Artificial Sequence
  ALK Forward Primer
tctaatggccaagttggagc

SEQ ID NO: 22097 - DNA, 20 bp, Artificial Sequence
  ALK Forward Primer
cactcttgctccttccatcc

SEQ ID NO: 22098 - DNA, 25 bp, Artificial Sequence
  ALK Forward Primer
gatgtaaccaaaattaactgagctg

SEQ ID NO: 22099 - DNA, 20 bp, Artificial Sequence
  ALK Forward Primer
aggatgttgctcaggcactt

SEQ ID NO: 22100 - DNA, 20 bp, Artificial Sequence
  ALK Forward Primer
aggacacacagggcagtagg

SEQ ID NO: 22101 - DNA, 20 bp, Artificial Sequence
  ALK Forward Primer
gccatatcactcacactgcc

SEQ ID NO: 22102 - DNA, 20 bp, Artificial Sequence
  ALK Forward Primer
atccagatcttggagcctca

SEQ ID NO: 22103 - DNA, 20 bp, Artificial Sequence
  ALK Forward Primer
acagtgacatcggtgggatt

SEQ ID NO: 22104 - DNA, 20 bp, Artificial Sequence
  ALK Forward Primer
tcgtcctgttcagagcacac

SEQ ID NO: 22105 - DNA, 20 bp, Artificial Sequence
  ALK Forward Primer
ggcttccagttcttcacctg

SEQ ID NO: 22106 - DNA, 20 bp, Artificial Sequence
  ALK Forward Primer
cgcagttgctctagatgctc

SEQ ID NO: 22107 - DNA, 20 bp, Artificial Sequence
  ALK Forward Primer
gagtctgcggtgctgtgata

SEQ ID NO: 22108 - DNA, 20 bp, Artificial Sequence
  ALK Forward Primer
cccctgagctctgaaccttt

SEQ ID NO: 22109 - DNA, 20 bp, Artificial Sequence
  ALK Forward Primer
aactgccaagccacagagtt

SEQ ID NO: 22110 - DNA, 22 bp, Artificial Sequence
  ALK Forward Primer
gctctaccaatgtgagtgacca

SEQ ID NO: 22111 - DNA, 20 bp, Artificial Sequence
  ALK Forward Primer
gccgagcacgtagtaaccat

SEQ ID NO: 22112 - DNA, 20 bp, Artificial Sequence
  ALK Forward Primer
ggttgggaccacactgagtt

SEQ ID NO: 22113 - DNA, 20 bp, Artificial Sequence
  ALK Forward Primer
accatcgtgatggacactga

SEQ ID NO: 22114 - DNA, 20 bp, Artificial Sequence
  ALK Forward Primer
accacaccaggtctcctttg

SEQ ID NO: 22115 - DNA, 20 bp, Artificial Sequence
  ALK Forward Primer
gaggatggaaggtgaaacga

SEQ ID NO: 22116 - DNA, 20 bp, Artificial Sequence
  ALK Forward Primer
gctgctgctgtaaggaaacc

SEQ ID NO: 22117 - DNA, 20 bp, Artificial Sequence
  ALK Forward Primer
ggtaggggagggacagaaag

SEQ ID NO: 22118 - DNA, 20 bp, Artificial Sequence
  ALK Forward Primer
aggagggagggtcagtcttg

SEQ ID NO: 22119 - DNA, 20 bp, Artificial Sequence
  ALK Forward Primer
ccacgcacatgatctttagg

SEQ ID NO: 22120 - DNA, 20 bp, Artificial Sequence
  ALK Forward Primer
aagctggggtgtacaggatg

SEQ ID NO: 22121 - DNA, 18 bp, Artificial Sequence
  ALK Forward Primer
gagggaagggaggctcag

SEQ ID NO: 22122 - DNA, 20 bp, Artificial Sequence
  ALK Forward Primer
aagagttgctcttcagcccc

SEQ ID NO: 22123 - DNA, 20 bp, Artificial Sequence
  ALK Forward Primer
gaatagctcccatcagcagg

SEQ ID NO: 22124 - DNA, 20 bp, Artificial Sequence
  ALK Forward Primer
ggagggagtgacaccttgaa

SEQ ID NO: 22125 - DNA, 20 bp, Artificial Sequence
  ALK Forward Primer
ggggcttcagatccacacta

SEQ ID NO: 22126 - DNA, 20 bp, Artificial Sequence
  ALK Forward Primer
gcactggaccttcgtttcat

SEQ ID NO: 22127 - DNA, 20 bp, Artificial Sequence
  ALK Forward Primer
ttccgctcaaaggagacagt

SEQ ID NO: 22128 - DNA, 20 bp, Artificial Sequence
  ALK Forward Primer
cacttgtggcccagattctt

SEQ ID NO: 22129 - DNA, 20 bp, Artificial Sequence
  ALK Forward Primer
gctgttgtcatgtggcagag

SEQ ID NO: 22130 - DNA, 20 bp, Artificial Sequence
  ALK Forward Primer
tgtctttaggggtggctgac

SEQ ID NO: 22131 - DNA, 20 bp, Artificial Sequence
  ALK Forward Primer
tctaacaattgcagggaggg

SEQ ID NO: 22132 - DNA, 20 bp, Artificial Sequence
  ALK Forward Primer
gggtggaacgtgtctgtctt

SEQ ID NO: 22133 - DNA, 20 bp, Artificial Sequence
  ALK Forward Primer
agggttcaaccagagaagca

SEQ ID NO: 22134 - DNA, 20 bp, Artificial Sequence
  ALK Forward Primer
cagtcctgtgggaggaccta

SEQ ID NO: 22135 - DNA, 20 bp, Artificial Sequence
  ALK Forward Primer
cacaggaacctggtggaaat

SEQ ID NO: 22136 - DNA, 20 bp, Artificial Sequence
  ALK Forward Primer
gagccatcgaggttttctga

SEQ ID NO: 22137 - DNA, 20 bp, Artificial Sequence
  ALK Forward Primer
ccaggattgtgctggagatt

SEQ ID NO: 22138 - DNA, 20 bp, Artificial Sequence
  ALK Forward Primer
gagagctggcatttcccata

SEQ ID NO: 22139 - DNA, 20 bp, Artificial Sequence
  ALK Forward Primer
tcctctcctacctccctggt

SEQ ID NO: 22140 - DNA, 20 bp, Artificial Sequence
  ALK Forward Primer
gtggctcaggcacaattttt

SEQ ID NO: 22141 - DNA, 20 bp, Artificial Sequence
  ALK Forward Primer
ggagatggaggtagtgcctg

SEQ ID NO: 22142 - DNA, 21 bp, Artificial Sequence
  ALK Forward Primer
tcccgtgaaaattatagcagc

SEQ ID NO: 22143 - DNA, 20 bp, Artificial Sequence
  ALK Forward Primer
ctttctcggtagcccctctt

SEQ ID NO: 22144 - DNA, 21 bp, Artificial Sequence
  ALK Forward Primer
aagtgaacttgcctcctagcc

SEQ ID NO: 22145 - DNA, 20 bp, Artificial Sequence
  ALK Forward Primer
gagccgactgtctattccca

SEQ ID NO: 22146 - DNA, 20 bp, Artificial Sequence
  ALK Forward Primer
tatgggactcggcagacttt

SEQ ID NO: 22147 - DNA, 20 bp, Artificial Sequence
  ALK Forward Primer
tcatggaatgcaaatggaga

SEQ ID NO: 22148 - DNA, 18 bp, Artificial Sequence
  ALK Forward Primer
atcaggtggggccatttc

SEQ ID NO: 22149 - DNA, 20 bp, Artificial Sequence
  ALK Forward Primer
ctgatgttggcttcacatgg

SEQ ID NO: 22150 - DNA, 20 bp, Artificial Sequence
  ALK Forward Primer
agtcagtggctggctatggt

SEQ ID NO: 22151 - DNA, 20 bp, Artificial Sequence
  ALK Forward Primer
cactcctgctgtggttgaga

SEQ ID NO: 22152 - DNA, 20 bp, Artificial Sequence
  ALK Forward Primer
ttctggctgtgtgacctgag

SEQ ID NO: 22153 - DNA, 20 bp, Artificial Sequence
  ALK Forward Primer
acaaggggctggcttaaagt

SEQ ID NO: 22154 - DNA, 20 bp, Artificial Sequence
  ALK Forward Primer
gctgttcagtttcacccagg

SEQ ID NO: 22155 - DNA, 20 bp, Artificial Sequence
  ALK Forward Primer
tgctctcaatgagctgatgc

SEQ ID NO: 22156 - DNA, 20 bp, Artificial Sequence
  ALK Forward Primer
tgaggtctgtcctacccacc

SEQ ID NO: 22157 - DNA, 20 bp, Artificial Sequence
  ALK Forward Primer
tgaaacacctgagcttgcag

SEQ ID NO: 22158 - DNA, 20 bp, Artificial Sequence
  ALK Forward Primer
gtgtatggtagtgggtgggg

SEQ ID NO: 22159 - DNA, 20 bp, Artificial Sequence
  ALK Forward Primer
gcacaaaccccataatccac

SEQ ID NO: 22160 - DNA, 20 bp, Artificial Sequence
  ALK Forward Primer
gtggatgtagtcccagcgtt

SEQ ID NO: 22161 - DNA, 19 bp, Artificial Sequence
  ALK Forward Primer
gtaacactgcagccccagg

SEQ ID NO: 22162 - DNA, 20 bp, Artificial Sequence
  ALK Forward Primer
ccttgtggaaacctccactg

SEQ ID NO: 22163 - DNA, 20 bp, Artificial Sequence
  ALK Forward Primer
ctttctgggcctcttccttt

SEQ ID NO: 22164 - DNA, 20 bp, Artificial Sequence
  ALK Forward Primer
aggatgggtgggttcgttag

SEQ ID NO: 22165 - DNA, 20 bp, Artificial Sequence
  ALK Forward Primer
gacaaaaaccccaactgagc

SEQ ID NO: 22166 - DNA, 20 bp, Artificial Sequence
  ALK Forward Primer
ggcacttcatgcagatcaga

SEQ ID NO: 22167 - DNA, 20 bp, Artificial Sequence
  ALK Forward Primer
cagctgatttctccacccat

SEQ ID NO: 22168 - DNA, 18 bp, Artificial Sequence
  ALK Forward Primer
gacagggagcaggggaat

SEQ ID NO: 22169 - DNA, 20 bp, Artificial Sequence
  ALK Forward Primer
tatgccctccttcctttcct

SEQ ID NO: 22170 - DNA, 21 bp, Artificial Sequence
  ALK Forward Primer
gctcatacaggagcaacacct

SEQ ID NO: 22171 - DNA, 20 bp, Artificial Sequence
  ALK Forward Primer
tatagcatttctgcccggag

SEQ ID NO: 22172 - DNA, 20 bp, Artificial Sequence
  ALK Forward Primer
ccagacctgcagaaccagat

SEQ ID NO: 22173 - DNA, 20 bp, Artificial Sequence
  ALK Forward Primer
acatgcatgcctcatttgaa

SEQ ID NO: 22174 - DNA, 20 bp, Artificial Sequence
  ALK Forward Primer
cctcttccatacgcacctgt

SEQ ID NO: 22175 - DNA, 20 bp, Artificial Sequence
  ALK Forward Primer
gccaggacagcaagaatagc

SEQ ID NO: 22176 - DNA, 20 bp, Artificial Sequence
  ALK Forward Primer
attgaaagctcggtgatgct

SEQ ID NO: 22177 - DNA, 20 bp, Artificial Sequence
  ALK Forward Primer
agaccaaaccttggggagtt

SEQ ID NO: 22178 - DNA, 20 bp, Artificial Sequence
  ALK Forward Primer
cacaggctttgaaatcagca

SEQ ID NO: 22179 - DNA, 20 bp, Artificial Sequence
  ALK Forward Primer
gctgtgaatatggatcccgt

SEQ ID NO: 22180 - DNA, 20 bp, Artificial Sequence
  ALK Forward Primer
taaaggtatgggcttggcac

SEQ ID NO: 22181 - DNA, 24 bp, Artificial Sequence
  ALK Forward Primer
caacctctctaagcctcagttttt

SEQ ID NO: 22182 - DNA, 20 bp, Artificial Sequence
  ALK Forward Primer
taaaggagggactccagggt

SEQ ID NO: 22183 - DNA, 18 bp, Artificial Sequence
  ALK Forward Primer
tcaaggcatggtggtcct

SEQ ID NO: 22184 - DNA, 20 bp, Artificial Sequence
  ALK Forward Primer
ggaccttggcaatctctgaa

SEQ ID NO: 22185 - DNA, 20 bp, Artificial Sequence
  ALK Forward Primer
ttttcatgattgacccacca

SEQ ID NO: 22186 - DNA, 20 bp, Artificial Sequence
  ALK Forward Primer
caggaggagtcaaggtgagc

SEQ ID NO: 22187 - DNA, 20 bp, Artificial Sequence
  ALK Forward Primer
tgcaactttgtagtgctgcg

SEQ ID NO: 22188 - DNA, 20 bp, Artificial Sequence
  ALK Forward Primer
ttttgaaatccctgagcctg

SEQ ID NO: 22189 - DNA, 20 bp, Artificial Sequence
  ALK Forward Primer
ctcaggttgaggctctggtc

SEQ ID NO: 22190 - DNA, 20 bp, Artificial Sequence
  ALK Forward Primer
ggtctgccttggtctctgaa

SEQ ID NO: 22191 - DNA, 20 bp, Artificial Sequence
  ALK Forward Primer
agcacattgtagcaccctcc

SEQ ID NO: 22192 - DNA, 20 bp, Artificial Sequence
  ALK Forward Primer
atttgactgcagcatttccc

SEQ ID NO: 22193 - DNA, 27 bp, Artificial Sequence
  ALK Forward Primer
ttacctctttcctcatacattagttgg

SEQ ID NO: 22194 - DNA, 20 bp, Artificial Sequence
  ALK Forward Primer
tttggtcagtggtagcctcc

SEQ ID NO: 22195 - DNA, 22 bp, Artificial Sequence
  ALK Forward Primer
tccattctcctgtgattttgtg

SEQ ID NO: 22196 - DNA, 20 bp, Artificial Sequence
  ALK Forward Primer
ggctttttgttccttccctt

SEQ ID NO: 22197 - DNA, 20 bp, Artificial Sequence
  ALK Forward Primer
ccccagaactttcttctcca

SEQ ID NO: 22198 - DNA, 20 bp, Artificial Sequence
  ALK Forward Primer
accatgcaggtcttgtggtt

SEQ ID NO: 22199 - DNA, 20 bp, Artificial Sequence
  ALK Forward Primer
catggtctagaacctgccgt

SEQ ID NO: 22200 - DNA, 20 bp, Artificial Sequence
  ALK Forward Primer
tgttgaggccttcaatttca

SEQ ID NO: 22201 - DNA, 20 bp, Artificial Sequence
  ALK Forward Primer
atcccatggaacaaagacca

SEQ ID NO: 22202 - DNA, 20 bp, Artificial Sequence
  ALK Forward Primer
ccaagggaaagtcaggaaca

SEQ ID NO: 22203 - DNA, 20 bp, Artificial Sequence
  ALK Forward Primer
agtgcatcaccataggggtt

SEQ ID NO: 22204 - DNA, 20 bp, Artificial Sequence
  ALK Forward Primer
gaaaggtgtcccgacttctg

SEQ ID NO: 22205 - DNA, 20 bp, Artificial Sequence
  ALK Forward Primer
tcctgctgctgtctctcaaa

SEQ ID NO: 22206 - DNA, 20 bp, Artificial Sequence
  ALK Forward Primer
attgttagggcccacattca

SEQ ID NO: 22207 - DNA, 20 bp, Artificial Sequence
  ALK Forward Primer
ttggggctcctgttttagtg

SEQ ID NO: 22208 - DNA, 20 bp, Artificial Sequence
  ALK Forward Primer
agcaattaggttgggggaat

SEQ ID NO: 22209 - DNA, 20 bp, Artificial Sequence
  ALK Forward Primer
cagaaccttggtctctggga

SEQ ID NO: 22210 - DNA, 20 bp, Artificial Sequence
  ALK Forward Primer
tttgtgtaagcacccagcag

SEQ ID NO: 22211 - DNA, 20 bp, Artificial Sequence
  ALK Forward Primer
ttaatgcacttgccctgatg

SEQ ID NO: 22212 - DNA, 20 bp, Artificial Sequence
  ALK Forward Primer
caacccccacctagcattag

SEQ ID NO: 22213 - DNA, 20 bp, Artificial Sequence
  ALK Forward Primer
gcagacgaagctttgggtaa

SEQ ID NO: 22214 - DNA, 20 bp, Artificial Sequence
  ALK Forward Primer
tgatttggatgcagcaagag

SEQ ID NO: 22215 - DNA, 20 bp, Artificial Sequence
  ALK Forward Primer
atgcaaggaaacaaaggcac

SEQ ID NO: 22216 - DNA, 20 bp, Artificial Sequence
  ALK Forward Primer
ctccagttccaccctgtcac

SEQ ID NO: 22217 - DNA, 20 bp, Artificial Sequence
  ALK Forward Primer
aagggagacacacccaaatg

SEQ ID NO: 22218 - DNA, 20 bp, Artificial Sequence
  ALK Forward Primer
tctaactacggtcccatgcc

SEQ ID NO: 22219 - DNA, 20 bp, Artificial Sequence
  ALK Forward Primer
gccaggctccttgtctgtag

SEQ ID NO: 22220 - DNA, 20 bp, Artificial Sequence
  ALK Forward Primer
cagctcactgctgcacttgt

SEQ ID NO: 22221 - DNA, 20 bp, Artificial Sequence
  ALK Forward Primer
attttctgcagggctagcaa

SEQ ID NO: 22222 - DNA, 20 bp, Artificial Sequence
  ALK Forward Primer
agaagggcgtacttggaaca

SEQ ID NO: 22223 - DNA, 20 bp, Artificial Sequence
  ALK Forward Primer
gaatcttggagctggaaacg

SEQ ID NO: 22224 - DNA, 20 bp, Artificial Sequence
  ALK Forward Primer
ggcagacctacctctcacca

SEQ ID NO: 22225 - DNA, 20 bp, Artificial Sequence
  ALK Forward Primer
ccccattttctctttcagca

SEQ ID NO: 22226 - DNA, 20 bp, Artificial Sequence
  ALK Forward Primer
agggcctttgcgtttctagt

SEQ ID NO: 22227 - DNA, 22 bp, Artificial Sequence
  ALK Forward Primer
tccgattggagactttgatacc

SEQ ID NO: 22228 - DNA, 20 bp, Artificial Sequence
  ALK Forward Primer
ggcctatccctctgtccttc

SEQ ID NO: 22229 - DNA, 20 bp, Artificial Sequence
  ALK Forward Primer
ttgtgttccagctgctgtct

SEQ ID NO: 22230 - DNA, 20 bp, Artificial Sequence
  ALK Forward Primer
ccagccacccactagtcaat

SEQ ID NO: 22231 - DNA, 20 bp, Artificial Sequence
  ALK Forward Primer
ggctgcctctatcaggtgag

SEQ ID NO: 22232 - DNA, 20 bp, Artificial Sequence
  ALK Forward Primer
gttgagagcagatgtggcaa

SEQ ID NO: 22233 - DNA, 20 bp, Artificial Sequence
  ALK Forward Primer
agccttagtcagcttctgcg

SEQ ID NO: 22234 - DNA, 22 bp, Artificial Sequence
  ALK Forward Primer
tttgtgcaacagataaccttgg

SEQ ID NO: 22235 - DNA, 20 bp, Artificial Sequence
  ALK Forward Primer
ccttggaccccatagtcaga

SEQ ID NO: 22236 - DNA, 20 bp, Artificial Sequence
  ALK Forward Primer
agggaggtgggagagacagt

SEQ ID NO: 22237 - DNA, 20 bp, Artificial Sequence
  ALK Forward Primer
gtggcgagagaagagcagtc

SEQ ID NO: 22238 - DNA, 20 bp, Artificial Sequence
  ALK Forward Primer
ataccagcttgggtgtcctg

SEQ ID NO: 22239 - DNA, 20 bp, Artificial Sequence
  ALK Forward Primer
atccattgattagcccagca

SEQ ID NO: 22240 - DNA, 20 bp, Artificial Sequence
  ALK Forward Primer
gggaaggccttacagtgaca

SEQ ID NO: 22241 - DNA, 20 bp, Artificial Sequence
  ALK Forward Primer
ctcagaaacgggattgtggt

SEQ ID NO: 22242 - DNA, 20 bp, Artificial Sequence
  ALK Forward Primer
gtgggaggaaagatgcagag

SEQ ID NO: 22243 - DNA, 20 bp, Artificial Sequence
  ALK Forward Primer
caaagccttgaatcccaaaa

SEQ ID NO: 22244 - DNA, 20 bp, Artificial Sequence
  ALK Forward Primer
aggccatattccccatgaag

SEQ ID NO: 22245 - DNA, 20 bp, Artificial Sequence
  ALK Forward Primer
agaaatcgacatgaacgctg

SEQ ID NO: 22246 - DNA, 20 bp, Artificial Sequence
  ALK Forward Primer
cagggaggagatgtctggag

SEQ ID NO: 22247 - DNA, 20 bp, Artificial Sequence
  ALK Forward Primer
acacgccttcatcaggtttc

SEQ ID NO: 22248 - DNA, 22 bp, Artificial Sequence
  ALK Forward Primer
gcaagaaaacaggcacttagag

SEQ ID NO: 22249 - DNA, 20 bp, Artificial Sequence
  ALK Forward Primer
aggggcttgagcgagtaaat

SEQ ID NO: 22250 - DNA, 20 bp, Artificial Sequence
  ALK Forward Primer
tttgagtcaggaacacgcac

SEQ ID NO: 22251 - DNA, 20 bp, Artificial Sequence
  ALK Forward Primer
tctaggaatggggtctgtgg

SEQ ID NO: 22252 - DNA, 20 bp, Artificial Sequence
  ALK Forward Primer
ataccagatgagccaccctg

SEQ ID NO: 22253 - DNA, 20 bp, Artificial Sequence
  ALK Forward Primer
ggggttccttccactctctc

SEQ ID NO: 22254 - DNA, 20 bp, Artificial Sequence
  ALK Forward Primer
aggctggctttgcataaaga

SEQ ID NO: 22255 - DNA, 20 bp, Artificial Sequence
  ALK Forward Primer
tctcacattccttccttggc

SEQ ID NO: 22256 - DNA, 20 bp, Artificial Sequence
  ALK Forward Primer
atgagctggacattcaaggc

SEQ ID NO: 22257 - DNA, 20 bp, Artificial Sequence
  ALK Forward Primer
attctgtgctcactttcggg

SEQ ID NO: 22258 - DNA, 20 bp, Artificial Sequence
  ALK Forward Primer
acttgtgtggttgcaatgga

SEQ ID NO: 22259 - DNA, 20 bp, Artificial Sequence
  ALK Forward Primer
acctctcttctcgcctgacc

SEQ ID NO: 22260 - DNA, 20 bp, Artificial Sequence
  ALK Forward Primer
ctcccgaggatttcagtcag

SEQ ID NO: 22261 - DNA, 20 bp, Artificial Sequence
  ALK Forward Primer
agcattgatgaggttcctgg

SEQ ID NO: 22262 - DNA, 20 bp, Artificial Sequence
  ALK Forward Primer
agcaactgcctcctaaacca

SEQ ID NO: 22263 - DNA, 20 bp, Artificial Sequence
  ALK Forward Primer
ttctgcatctccaagcctct

SEQ ID NO: 22264 - DNA, 20 bp, Artificial Sequence
  ALK Forward Primer
cagccaatgacatttctcca

SEQ ID NO: 22265 - DNA, 20 bp, Artificial Sequence
  ALK Forward Primer
ttggaaaccatcgtcctaca

SEQ ID NO: 22266 - DNA, 20 bp, Artificial Sequence
  ALK Forward Primer
agatggccagacatgagagc

SEQ ID NO: 22267 - DNA, 20 bp, Artificial Sequence
  ALK Forward Primer
ccacagaaccttgaacgctt

SEQ ID NO: 22268 - DNA, 20 bp, Artificial Sequence
  ALK Forward Primer
aatttcacacgagcaggaaa

SEQ ID NO: 22269 - DNA, 20 bp, Artificial Sequence
  ALK Forward Primer
ggacaggtctgagtagggca

SEQ ID NO: 22270 - DNA, 20 bp, Artificial Sequence
  ALK Forward Primer
ctcttaactgcatggctggg

SEQ ID NO: 22271 - DNA, 20 bp, Artificial Sequence
  ALK Forward Primer
gataaacgggcacagatgct

SEQ ID NO: 22272 - DNA, 20 bp, Artificial Sequence
  ALK Forward Primer
gaacgaatcggttttgccta

SEQ ID NO: 22273 - DNA, 20 bp, Artificial Sequence
  ALK Forward Primer
tattgcttgtctgggtgtgc

SEQ ID NO: 22274 - DNA, 22 bp, Artificial Sequence
  ALK Forward Primer
cagctgaaattagggaatgaca

SEQ ID NO: 22275 - DNA, 20 bp, Artificial Sequence
  ALK Forward Primer
ctgaggtggagttagaggcg

SEQ ID NO: 22276 - DNA, 20 bp, Artificial Sequence
  ALK Forward Primer
cagagactgtgctccagtgc

SEQ ID NO: 22277 - DNA, 20 bp, Artificial Sequence
  ALK Forward Primer
ctaccccaaggggttgtttt

SEQ ID NO: 22278 - DNA, 20 bp, Artificial Sequence
  ALK Forward Primer
gacgctcttcaatgcctttc

SEQ ID NO: 22279 - DNA, 20 bp, Artificial Sequence
  ALK Forward Primer
tgcaaagggaacaggaaatc

SEQ ID NO: 22280 - DNA, 20 bp, Artificial Sequence
  ALK Forward Primer
attccagcagaaagagcagc

SEQ ID NO: 22281 - DNA, 20 bp, Artificial Sequence
  ALK Forward Primer
tgggggcaatctgactagag

SEQ ID NO: 22282 - DNA, 20 bp, Artificial Sequence
  ALK Forward Primer
tttgtcggacacaggttgaa

SEQ ID NO: 22283 - DNA, 20 bp, Artificial Sequence
  ALK Forward Primer
tgcctttaacatggcaactg

SEQ ID NO: 22284 - DNA, 20 bp, Artificial Sequence
  ALK Forward Primer
ccgttgactagagcctggag

SEQ ID NO: 22285 - DNA, 20 bp, Artificial Sequence
  ALK Forward Primer
cttctagcaatctgggcagc

SEQ ID NO: 22286 - DNA, 21 bp, Artificial Sequence
  ALK Forward Primer
agcatttagtgtggatcaggc

SEQ ID NO: 22287 - DNA, 20 bp, Artificial Sequence
  ALK Forward Primer
aagcctctgccctttcatct

SEQ ID NO: 22288 - DNA, 20 bp, Artificial Sequence
  ALK Forward Primer
agggaagaaggaggctgaga

SEQ ID NO: 22289 - DNA, 20 bp, Artificial Sequence
  ALK Forward Primer
tcctttgacagcactgatgc

SEQ ID NO: 22290 - DNA, 20 bp, Artificial Sequence
  ALK Forward Primer
ccctttatagaaatggcccc

SEQ ID NO: 22291 - DNA, 20 bp, Artificial Sequence
  ALK Forward Primer
ggcacttcaccgttttgatt

SEQ ID NO: 22292 - DNA, 20 bp, Artificial Sequence
  ALK Forward Primer
gagaggcaacaccatccact

SEQ ID NO: 22293 - DNA, 20 bp, Artificial Sequence
  ALK Forward Primer
tgagttcagcctggtgagaa

SEQ ID NO: 22294 - DNA, 20 bp, Artificial Sequence
  ALK Forward Primer
ggccccaatttactttgtga

SEQ ID NO: 22295 - DNA, 20 bp, Artificial Sequence
  ALK Forward Primer
catctttcgaagaggatgcc

SEQ ID NO: 22296 - DNA, 21 bp, Artificial Sequence
  ALK Forward Primer
cgtcagagtaaaggtaccccc

SEQ ID NO: 22297 - DNA, 20 bp, Artificial Sequence
  ALK Forward Primer
ccatttctccatatcctggg

SEQ ID NO: 22298 - DNA, 20 bp, Artificial Sequence
  ALK Forward Primer
cccacctcctaatccactga

SEQ ID NO: 22299 - DNA, 20 bp, Artificial Sequence
  ALK Forward Primer
gtaaccatttctttgcccca

SEQ ID NO: 22300 - DNA, 20 bp, Artificial Sequence
  ALK Forward Primer
tgacttgggctcaacaactg

SEQ ID NO: 22301 - DNA, 25 bp, Artificial Sequence
  ALK Forward Primer
gggttatagggactgttaactgaaa

SEQ ID NO: 22302 - DNA, 20 bp, Artificial Sequence
  ALK Forward Primer
tttttggaaggtgcttttgg

SEQ ID NO: 22303 - DNA, 19 bp, Artificial Sequence
  ALK Forward Primer
ctgatggcagaacaaggca

SEQ ID NO: 22304 - DNA, 20 bp, Artificial Sequence
  ALK Forward Primer
gcccctgtgtgagaaacagt

SEQ ID NO: 22305 - DNA, 20 bp, Artificial Sequence
  ALK Forward Primer
ggagagggcaagaagtgatg

SEQ ID NO: 22306 - DNA, 21 bp, Artificial Sequence
  ALK Forward Primer
cctgacttgcatttctctgct

SEQ ID NO: 22307 - DNA, 20 bp, Artificial Sequence
  ALK Forward Primer
ggcacgttgtaggaaccaat

SEQ ID NO: 22308 - DNA, 20 bp, Artificial Sequence
  ALK Forward Primer
agcatgtcagcaagatgcag

SEQ ID NO: 22309 - DNA, 20 bp, Artificial Sequence
  ALK Forward Primer
cttgaagatgagctcctgcc

SEQ ID NO: 22310 - DNA, 20 bp, Artificial Sequence
  ALK Forward Primer
gtccctgtgctcctgtgact

SEQ ID NO: 22311 - DNA, 20 bp, Artificial Sequence
  ALK Forward Primer
tgcctcaaaaggggattatg

SEQ ID NO: 22312 - DNA, 20 bp, Artificial Sequence
  ALK Forward Primer
aagtgcagcctgggtagaga

SEQ ID NO: 22313 - DNA, 20 bp, Artificial Sequence
  ALK Forward Primer
agagaccccgtgagcagtaa

SEQ ID NO: 22314 - DNA, 20 bp, Artificial Sequence
  ALK Forward Primer
gcttgctgatgccagtaaca

SEQ ID NO: 22315 - DNA, 20 bp, Artificial Sequence
  ALK Forward Primer
tgtatgtaaagccggaacgg

SEQ ID NO: 22316 - DNA, 20 bp, Artificial Sequence
  ALK Forward Primer
taggaaatgttctgacgggg

SEQ ID NO: 22317 - DNA, 20 bp, Artificial Sequence
  ALK Forward Primer
tatagggtgccagagggttg

SEQ ID NO: 22318 - DNA, 20 bp, Artificial Sequence
  ALK Forward Primer
atgcttgcaattatggaggc

SEQ ID NO: 22319 - DNA, 23 bp, Artificial Sequence
  ALK Forward Primer
ccctttctctatagcaaagctca

SEQ ID NO: 22320 - DNA, 20 bp, Artificial Sequence
  ALK Forward Primer
cccacttcagggagaatcaa

SEQ ID NO: 22321 - DNA, 20 bp, Artificial Sequence
  ALK Forward Primer
ggcaggggacactttgttag

SEQ ID NO: 22322 - DNA, 20 bp, Artificial Sequence
  ALK Forward Primer
aagtagatgtggggcacagg

SEQ ID NO: 22323 - DNA, 20 bp, Artificial Sequence
  ALK Forward Primer
caggggctgagacagtgatt

SEQ ID NO: 22324 - DNA, 20 bp, Artificial Sequence
  ALK Forward Primer
tggaagagggttatgcttgc

SEQ ID NO: 22325 - DNA, 20 bp, Artificial Sequence
  ALK Forward Primer
tggtaacaacctcatgcagc

SEQ ID NO: 22326 - DNA, 22 bp, Artificial Sequence
  ALK Forward Primer
tttctgtatcaataaatggggg

SEQ ID NO: 22327 - DNA, 20 bp, Artificial Sequence
  ALK Forward Primer
aatggcttgcttttcagcat

SEQ ID NO: 22328 - DNA, 20 bp, Artificial Sequence
  ALK Forward Primer
ggctcatcagaacagggaag

SEQ ID NO: 22329 - DNA, 20 bp, Artificial Sequence
  ALK Forward Primer
cccttgccctctaacacaaa

SEQ ID NO: 22330 - DNA, 20 bp, Artificial Sequence
  ALK Forward Primer
acagggcaaacagggtgtag

SEQ ID NO: 22331 - DNA, 20 bp, Artificial Sequence
  ALK Forward Primer
ccagctgtgtgtggtctagg

SEQ ID NO: 22332 - DNA, 20 bp, Artificial Sequence
  ALK Forward Primer
gagaggagctggtggagatg

SEQ ID NO: 22333 - DNA, 26 bp, Artificial Sequence
  ALK Forward Primer
ttggtctcagaatcatcactaaagtc

SEQ ID NO: 22334 - DNA, 20 bp, Artificial Sequence
  ALK Forward Primer
ccttcccactgtaccacgtt

SEQ ID NO: 22335 - DNA, 20 bp, Artificial Sequence
  ALK Forward Primer
gggcagagagtggacaactt

SEQ ID NO: 22336 - DNA, 20 bp, Artificial Sequence
  ALK Forward Primer
cttggtccccaaatacctga

SEQ ID NO: 22337 - DNA, 20 bp, Artificial Sequence
  ALK Forward Primer
ccacccaatgaacaaactcc

SEQ ID NO: 22338 - DNA, 20 bp, Artificial Sequence
  ALK Forward Primer
ccccaagttgagaaggttcc

SEQ ID NO: 22339 - DNA, 20 bp, Artificial Sequence
  ALK Forward Primer
gggctgataaaggaaggtcc

SEQ ID NO: 22340 - DNA, 20 bp, Artificial Sequence
  ALK Forward Primer
atcaccagcaccctgaaaag

SEQ ID NO: 22341 - DNA, 20 bp, Artificial Sequence
  ALK Forward Primer
tgttgagacattcaggctgc

SEQ ID NO: 22342 - DNA, 20 bp, Artificial Sequence
  ALK Forward Primer
tgtaagtggctccccagttt

SEQ ID NO: 22343 - DNA, 20 bp, Artificial Sequence
  ALK Forward Primer
ccctggaagttagattggca

SEQ ID NO: 22344 - DNA, 20 bp, Artificial Sequence
  ALK Forward Primer
ttcagtgcacctccaaatca

SEQ ID NO: 22345 - DNA, 20 bp, Artificial Sequence
  ALK Forward Primer
ggactgagctgggtttgaag

SEQ ID NO: 22346 - DNA, 20 bp, Artificial Sequence
  ALK Forward Primer
tttctgccactggggtttag

SEQ ID NO: 22347 - DNA, 20 bp, Artificial Sequence
  ALK Forward Primer
caagttctggaaaagggcag

SEQ ID NO: 22348 - DNA, 20 bp, Artificial Sequence
  ALK Forward Primer
taaggatcctcccgtcctct

SEQ ID NO: 22349 - DNA, 20 bp, Artificial Sequence
  ALK Forward Primer
gaagtggcgaatgtcgagtt

SEQ ID NO: 22350 - DNA, 20 bp, Artificial Sequence
  ALK Forward Primer
tgttgtctgtccctctgctg

SEQ ID NO: 22351 - DNA, 20 bp, Artificial Sequence
  ALK Forward Primer
tctcttcctcttcccccagt

SEQ ID NO: 22352 - DNA, 20 bp, Artificial Sequence
  ALK Forward Primer
cagcatcaggaaccatttga

SEQ ID NO: 22353 - DNA, 20 bp, Artificial Sequence
  ALK Forward Primer
gggtatggctgtttaaggca

SEQ ID NO: 22354 - DNA, 20 bp, Artificial Sequence
  ALK Forward Primer
gtagcactttcagaagcggg

SEQ ID NO: 22355 - DNA, 20 bp, Artificial Sequence
  ALK Forward Primer
caaggtcaccagctttagcc

SEQ ID NO: 22356 - DNA, 20 bp, Artificial Sequence
  ALK Forward Primer
tgctgtggtatgagtgccat

SEQ ID NO: 22357 - DNA, 20 bp, Artificial Sequence
  ALK Forward Primer
gggagagggggtagttcagt

SEQ ID NO: 22358 - DNA, 20 bp, Artificial Sequence
  ALK Forward Primer
ggaacagagacatgaagggc

SEQ ID NO: 22359 - DNA, 20 bp, Artificial Sequence
  ALK Forward Primer
tgctggccatatagaccctc

SEQ ID NO: 22360 - DNA, 20 bp, Artificial Sequence
  ALK Forward Primer
ccccagtcataaagagggct

SEQ ID NO: 22361 - DNA, 20 bp, Artificial Sequence
  ALK Forward Primer
gtgtgtgaacgctctaggca

SEQ ID NO: 22362 - DNA, 20 bp, Artificial Sequence
  ALK Forward Primer
atggagagagcagagaggca

SEQ ID NO: 22363 - DNA, 20 bp, Artificial Sequence
  ALK Forward Primer
gctgctaaaagcccttgtgt

SEQ ID NO: 22364 - DNA, 20 bp, Artificial Sequence
  ALK Forward Primer
cagtcattggggcctcttta

SEQ ID NO: 22365 - DNA, 20 bp, Artificial Sequence
  ALK Forward Primer
agctgcagagaagcctgtgt

SEQ ID NO: 22366 - DNA, 20 bp, Artificial Sequence
  ALK Forward Primer
atggaagattccagtgggtg

SEQ ID NO: 22367 - DNA, 20 bp, Artificial Sequence
  ALK Forward Primer
ggggagagagtgtggaaaca

SEQ ID NO: 22368 - DNA, 20 bp, Artificial Sequence
  ALK Forward Primer
cagtggacaattgatgtggc

SEQ ID NO: 22369 - DNA, 20 bp, Artificial Sequence
  ALK Forward Primer
ttcttgggctgtagccagtt

SEQ ID NO: 22370 - DNA, 23 bp, Artificial Sequence
  ALK Forward Primer
tcatgggaaaaatgctagaagaa

SEQ ID NO: 22371 - DNA, 20 bp, Artificial Sequence
  ALK Forward Primer
ctgacccatctaggggatga

SEQ ID NO: 22372 - DNA, 20 bp, Artificial Sequence
  ALK Forward Primer
atgtcacctccatctcaggc

SEQ ID NO: 22373 - DNA, 22 bp, Artificial Sequence
  ALK Forward Primer
gacctcagagtgtcagtaggca

SEQ ID NO: 22374 - DNA, 20 bp, Artificial Sequence
  ALK Forward Primer
tgctcagcttctggctatca

SEQ ID NO: 22375 - DNA, 20 bp, Artificial Sequence
  ALK Forward Primer
caaaaatgccggaaaggata

SEQ ID NO: 22376 - DNA, 20 bp, Artificial Sequence
  ALK Forward Primer
gccctcagtgcctgaagtag

SEQ ID NO: 22377 - DNA, 20 bp, Artificial Sequence
  ALK Forward Primer
cggaacagaacagggtaagc

SEQ ID NO: 22378 - DNA, 20 bp, Artificial Sequence
  ALK Forward Primer
actggggtctgcatatctgg

SEQ ID NO: 22379 - DNA, 20 bp, Artificial Sequence
  ALK Forward Primer
agcaccatgttcaagtgcag

SEQ ID NO: 22380 - DNA, 20 bp, Artificial Sequence
  ALK Forward Primer
ctgggcatagaggacttcca

SEQ ID NO: 22381 - DNA, 20 bp, Artificial Sequence
  ALK Forward Primer
tgtcccattccaacaagtga

SEQ ID NO: 22382 - DNA, 20 bp, Artificial Sequence
  ALK Forward Primer
aaggtgagcagcagagtggt

SEQ ID NO: 22383 - DNA, 20 bp, Artificial Sequence
  ALK Forward Primer
tgcagcactttctgttctgg

SEQ ID NO: 22384 - DNA, 20 bp, Artificial Sequence
  ALK Forward Primer
ttagcctccctgaccaaatg

SEQ ID NO: 22385 - DNA, 20 bp, Artificial Sequence
  ALK Forward Primer
ttccaactctggctgcaaat

SEQ ID NO: 22386 - DNA, 20 bp, Artificial Sequence
  ALK Forward Primer
gacttatctcaggccccaca

SEQ ID NO: 22387 - DNA, 20 bp, Artificial Sequence
  ALK Forward Primer
ctgattgaaatcctgccgtc

SEQ ID NO: 22388 - DNA, 20 bp, Artificial Sequence
  ALK Forward Primer
ggaatagcagacccccaaat

SEQ ID NO: 22389 - DNA, 20 bp, Artificial Sequence
  ALK Forward Primer
cactgggagcccagagtaga

SEQ ID NO: 22390 - DNA, 20 bp, Artificial Sequence
  ALK Forward Primer
ggaatcaatcccccactgta

SEQ ID NO: 22391 - DNA, 20 bp, Artificial Sequence
  ALK Forward Primer
ggaaggtgtggtctccctaa

SEQ ID NO: 22392 - DNA, 20 bp, Artificial Sequence
  ALK Forward Primer
ctccctcaacctcctgaaca

SEQ ID NO: 22393 - DNA, 21 bp, Artificial Sequence
  ALK Forward Primer
tggtttagtttcttctgccca

SEQ ID NO: 22394 - DNA, 20 bp, Artificial Sequence
  ALK Forward Primer
ctctcctctggggacacctt

SEQ ID NO: 22395 - DNA, 20 bp, Artificial Sequence
  ALK Forward Primer
ggttagtggctggctgagag

SEQ ID NO: 22396 - DNA, 20 bp, Artificial Sequence
  ALK Forward Primer
caattagatggacgcctggt

SEQ ID NO: 22397 - DNA, 20 bp, Artificial Sequence
  ALK Forward Primer
agctcctgtttcccattgac

SEQ ID NO: 22398 - DNA, 21 bp, Artificial Sequence
  ALK Forward Primer
tcataaaaactggaaggaccg

SEQ ID NO: 22399 - DNA, 20 bp, Artificial Sequence
  ALK Forward Primer
gatgtcctgttctgggcagt

SEQ ID NO: 22400 - DNA, 20 bp, Artificial Sequence
  ALK Forward Primer
acagaaacccatgcatcctc

SEQ ID NO: 22401 - DNA, 20 bp, Artificial Sequence
  ALK Forward Primer
ggagctggagtctaggggac

SEQ ID NO: 22402 - DNA, 20 bp, Artificial Sequence
  ALK Forward Primer
accctctaaagccagccatt

SEQ ID NO: 22403 - DNA, 20 bp, Artificial Sequence
  ALK Forward Primer
ccgtctcattgcaaggattt

SEQ ID NO: 22404 - DNA, 20 bp, Artificial Sequence
  ALK Forward Primer
gccagatcttgggacagaga

SEQ ID NO: 22405 - DNA, 20 bp, Artificial Sequence
  ALK Forward Primer
gccatgtcccttcacatctt

SEQ ID NO: 22406 - DNA, 20 bp, Artificial Sequence
  ALK Forward Primer
gcagggagtccatgtcactt

SEQ ID NO: 22407 - DNA, 20 bp, Artificial Sequence
  ALK Forward Primer
gccagtacgtctcaagaggg

SEQ ID NO: 22408 - DNA, 20 bp, Artificial Sequence
  ALK Forward Primer
gggaggtgagtggatacgaa

SEQ ID NO: 22409 - DNA, 20 bp, Artificial Sequence
  ALK Forward Primer
catttttgtggtcgggttct

SEQ ID NO: 22410 - DNA, 20 bp, Artificial Sequence
  ALK Forward Primer
cattctgcaccatacctccc

SEQ ID NO: 22411 - DNA, 20 bp, Artificial Sequence
  ALK Forward Primer
acctgatcatgggtagtggc

SEQ ID NO: 22412 - DNA, 20 bp, Artificial Sequence
  ALK Forward Primer
aaatctctgccttggcctct

SEQ ID NO: 22413 - DNA, 20 bp, Artificial Sequence
  ALK Forward Primer
cacatagccccaactcctgt

SEQ ID NO: 22414 - DNA, 20 bp, Artificial Sequence
  ALK Forward Primer
aaagaaacctggaaacgggt

SEQ ID NO: 22415 - DNA, 20 bp, Artificial Sequence
  ALK Forward Primer
tcagcctcagtccgcttatt

SEQ ID NO: 22416 - DNA, 20 bp, Artificial Sequence
  ALK Forward Primer
tccccaggtacacaggactc

SEQ ID NO: 22417 - DNA, 21 bp, Artificial Sequence
  ALK Forward Primer
tgaggaaaatgtggatgacaa

SEQ ID NO: 22418 - DNA, 20 bp, Artificial Sequence
  ALK Forward Primer
tgatggaagccaccacataa

SEQ ID NO: 22419 - DNA, 20 bp, Artificial Sequence
  ALK Forward Primer
gcccacacacctcttgatct

SEQ ID NO: 22420 - DNA, 20 bp, Artificial Sequence
  ALK Forward Primer
ggtgagaaggtgaactggga

SEQ ID NO: 22421 - DNA, 22 bp, Artificial Sequence
  ALK Forward Primer
gggtgtttttgaagaaccctta

SEQ ID NO: 22422 - DNA, 24 bp, Artificial Sequence
  ALK Forward Primer
aaacctttctgaatttctgtgtcc

SEQ ID NO: 22423 - DNA, 20 bp, Artificial Sequence
  ALK Forward Primer
tgcgtctattttcagagggg

SEQ ID NO: 22424 - DNA, 20 bp, Artificial Sequence
  ALK Forward Primer
ttggatttactggctcaggg

SEQ ID NO: 22425 - DNA, 20 bp, Artificial Sequence
  ALK Forward Primer
tccatctgctttcctgacct

SEQ ID NO: 22426 - DNA, 20 bp, Artificial Sequence
  ALK Forward Primer
tggccattcctctgaaactc

SEQ ID NO: 22427 - DNA, 21 bp, Artificial Sequence
  ALK Forward Primer
catcaagcaaagaatttggga

SEQ ID NO: 22428 - DNA, 20 bp, Artificial Sequence
  ALK Forward Primer
ccggagtttccgattcagta

SEQ ID NO: 22429 - DNA, 20 bp, Artificial Sequence
  ALK Forward Primer
acttggcatactcgacccag

SEQ ID NO: 22430 - DNA, 20 bp, Artificial Sequence
  ALK Forward Primer
gggcaggacactgattgttt

SEQ ID NO: 22431 - DNA, 20 bp, Artificial Sequence
  ALK Forward Primer
ctcgaatgtacaacggggat

SEQ ID NO: 22432 - DNA, 20 bp, Artificial Sequence
  ALK Forward Primer
agcctgccactttgttcttg

SEQ ID NO: 22433 - DNA, 20 bp, Artificial Sequence
  ALK Forward Primer
ggcaatggctgaagagagac

SEQ ID NO: 22434 - DNA, 20 bp, Artificial Sequence
  ALK Forward Primer
cagctggaagaaggatggag

SEQ ID NO: 22435 - DNA, 20 bp, Artificial Sequence
  ALK Forward Primer
gggctgataaactgctgctc

SEQ ID NO: 22436 - DNA, 20 bp, Artificial Sequence
  ALK Forward Primer
acatttgttgtggccagtga

SEQ ID NO: 22437 - DNA, 20 bp, Artificial Sequence
  ALK Forward Primer
ttttgtgggggtgaagacat

SEQ ID NO: 22438 - DNA, 20 bp, Artificial Sequence
  ALK Forward Primer
ctgtgacttgtgtggttccg

SEQ ID NO: 22439 - DNA, 20 bp, Artificial Sequence
  ALK Forward Primer
gcaccagagagagaagtggc

SEQ ID NO: 22440 - DNA, 20 bp, Artificial Sequence
  ALK Forward Primer
atctgtgctccgcttcaagt

SEQ ID NO: 22441 - DNA, 20 bp, Artificial Sequence
  ALK Forward Primer
ccttgtggctgtggtgagta

SEQ ID NO: 22442 - DNA, 18 bp, Artificial Sequence
  ALK Forward Primer
ccatgtcctccatcaggc

SEQ ID NO: 22443 - DNA, 20 bp, Artificial Sequence
  ALK Forward Primer
gagcttttattgctttgccg

SEQ ID NO: 22444 - DNA, 22 bp, Artificial Sequence
  ALK Forward Primer
cattgtactgttctgggcacat

SEQ ID NO: 22445 - DNA, 20 bp, Artificial Sequence
  ALK Forward Primer
tcacttggcagctcaaacac

SEQ ID NO: 22446 - DNA, 20 bp, Artificial Sequence
  ALK Forward Primer
ctgtcttaggtggccctgtg

SEQ ID NO: 22447 - DNA, 20 bp, Artificial Sequence
  ALK Forward Primer
gcttacacggctagtgaggg

SEQ ID NO: 22448 - DNA, 20 bp, Artificial Sequence
  ALK Forward Primer
tgcttagtcagagttggccc

SEQ ID NO: 22449 - DNA, 20 bp, Artificial Sequence
  ALK Forward Primer
ggagacacctgagttcagcc

SEQ ID NO: 22450 - DNA, 20 bp, Artificial Sequence
  ALK Forward Primer
ccaggccatggtactcactt

SEQ ID NO: 22451 - DNA, 20 bp, Artificial Sequence
  ALK Forward Primer
actgtcctggcatctggaat

SEQ ID NO: 22452 - DNA, 20 bp, Artificial Sequence
  ALK Forward Primer
ggtcaaaccacagccagagt

SEQ ID NO: 22453 - DNA, 20 bp, Artificial Sequence
  ALK Forward Primer
ccctttcctgggtcaaaagt

SEQ ID NO: 22454 - DNA, 20 bp, Artificial Sequence
  ALK Forward Primer
gaaaaggcaatgctgtcctc

SEQ ID NO: 22455 - DNA, 20 bp, Artificial Sequence
  ALK Forward Primer
ccaagtgctgtagaggaggc

SEQ ID NO: 22456 - DNA, 20 bp, Artificial Sequence
  ALK Forward Primer
acactgcagcatccacacac

SEQ ID NO: 22457 - DNA, 20 bp, Artificial Sequence
  ALK Forward Primer
tccttcttcactgggtgctt

SEQ ID NO: 22458 - DNA, 20 bp, Artificial Sequence
  ALK Forward Primer
cttgttagctgggtggtggt

SEQ ID NO: 22459 - DNA, 20 bp, Artificial Sequence
  ALK Forward Primer
aatcctctcctgtccctggt

SEQ ID NO: 22460 - DNA, 20 bp, Artificial Sequence
  ALK Forward Primer
gggccataatggtggtaaaa

SEQ ID NO: 22461 - DNA, 20 bp, Artificial Sequence
  ALK Forward Primer
aagcatgggcatatttgagg

SEQ ID NO: 22462 - DNA, 20 bp, Artificial Sequence
  ALK Forward Primer
atgactccctgtatgctggc

SEQ ID NO: 22463 - DNA, 20 bp, Artificial Sequence
  ALK Forward Primer
cttggtttatgccccatttg

SEQ ID NO: 22464 - DNA, 20 bp, Artificial Sequence
  ALK Forward Primer
tgtgtccacagttacgggaa

SEQ ID NO: 22465 - DNA, 20 bp, Artificial Sequence
  ALK Forward Primer
ggaggcatagccttctccat

SEQ ID NO: 22466 - DNA, 24 bp, Artificial Sequence
  ALK Forward Primer
tcttggcatgtatacaggtgattc

SEQ ID NO: 22467 - DNA, 20 bp, Artificial Sequence
  ALK Forward Primer
cacatcgaggaacccagatt

SEQ ID NO: 22468 - DNA, 20 bp, Artificial Sequence
  ALK Forward Primer
acacctggaatggctgagag

SEQ ID NO: 22469 - DNA, 20 bp, Artificial Sequence
  ALK Forward Primer
atcctgccagttccttctga

SEQ ID NO: 22470 - DNA, 20 bp, Artificial Sequence
  ALK Forward Primer
cccattttggtgaatgaagg

SEQ ID NO: 22471 - DNA, 20 bp, Artificial Sequence
  ALK Forward Primer
tgtgttggctgaagcaagag

SEQ ID NO: 22472 - DNA, 20 bp, Artificial Sequence
  ALK Forward Primer
ttatggatctggttgagccc

SEQ ID NO: 22473 - DNA, 20 bp, Artificial Sequence
  ALK Forward Primer
tcgataccaaaaagggttgg

SEQ ID NO: 22474 - DNA, 19 bp, Artificial Sequence
  ALK Forward Primer
gcaacatcgcctgaggttt

SEQ ID NO: 22475 - DNA, 20 bp, Artificial Sequence
  ALK Forward Primer
aattgataggccccaaaacc

SEQ ID NO: 22476 - DNA, 20 bp, Artificial Sequence
  ALK Forward Primer
tgggaacccagagaagcata

SEQ ID NO: 22477 - DNA, 25 bp, Artificial Sequence
  ALK Forward Primer
tggctcttccaatactaggatgata

SEQ ID NO: 22478 - DNA, 20 bp, Artificial Sequence
  ALK Forward Primer
tattccagctggtctggctt

SEQ ID NO: 22479 - DNA, 20 bp, Artificial Sequence
  ALK Forward Primer
aggattcgggacaaaggttc

SEQ ID NO: 22480 - DNA, 20 bp, Artificial Sequence
  ALK Forward Primer
tcagagcagtggcaaggtta

SEQ ID NO: 22481 - DNA, 25 bp, Artificial Sequence
  ALK Forward Primer
caaagttgaatgcctatgtaaagtg

SEQ ID NO: 22482 - DNA, 20 bp, Artificial Sequence
  ALK Forward Primer
ataggctgtggcacatggat

SEQ ID NO: 22483 - DNA, 20 bp, Artificial Sequence
  ALK Forward Primer
agagacagtggcccctcata

SEQ ID NO: 22484 - DNA, 20 bp, Artificial Sequence
  ALK Forward Primer
tgggcacaaaaggagaactt

SEQ ID NO: 22485 - DNA, 20 bp, Artificial Sequence
  ALK Forward Primer
ctcaagaccctgctttccag

SEQ ID NO: 22486 - DNA, 20 bp, Artificial Sequence
  ALK Forward Primer
ggagaggcacacagaagagg

SEQ ID NO: 22487 - DNA, 20 bp, Artificial Sequence
  ALK Forward Primer
cacgtgcacagtggatctct

SEQ ID NO: 22488 - DNA, 20 bp, Artificial Sequence
  ALK Forward Primer
agtcctccccgagacaaact

SEQ ID NO: 22489 - DNA, 21 bp, Artificial Sequence
  ALK Forward Primer
caaacgattgaaaggatcagc

SEQ ID NO: 22490 - DNA, 20 bp, Artificial Sequence
  ALK Forward Primer
gtgagctcaggaggatccag

SEQ ID NO: 22491 - DNA, 20 bp, Artificial Sequence
  ALK Forward Primer
aagttccacaaaaaccgtgc

SEQ ID NO: 22492 - DNA, 20 bp, Artificial Sequence
  ALK Forward Primer
ggtctgggtagggaggaagt

SEQ ID NO: 22493 - DNA, 20 bp, Artificial Sequence
  ALK Forward Primer
attggaccccctgctagtct

SEQ ID NO: 22494 - DNA, 20 bp, Artificial Sequence
  ALK Forward Primer
gccacactgattctttgggt

SEQ ID NO: 22495 - DNA, 20 bp, Artificial Sequence
  ALK Forward Primer
ccatttcacttcaccgatcc

SEQ ID NO: 22496 - DNA, 20 bp, Artificial Sequence
  ALK Forward Primer
gcacccaaatgactcaggat

SEQ ID NO: 22497 - DNA, 20 bp, Artificial Sequence
  ALK Forward Primer
tgtttgcttcacagccacat

SEQ ID NO: 22498 - DNA, 22 bp, Artificial Sequence
  ALK Forward Primer
tttataagcggtaacaacacca

SEQ ID NO: 22499 - DNA, 20 bp, Artificial Sequence
  ALK Forward Primer
cctcggcacactcattcttt

SEQ ID NO: 22500 - DNA, 20 bp, Artificial Sequence
  ALK Forward Primer
ctgctttggcctgactgttt

SEQ ID NO: 22501 - DNA, 20 bp, Artificial Sequence
  ALK Forward Primer
ttccctttgcataatggctc

SEQ ID NO: 22502 - DNA, 20 bp, Artificial Sequence
  ALK Forward Primer
tgagtgcttgccatgaaaaa

SEQ ID NO: 22503 - DNA, 20 bp, Artificial Sequence
  ALK Forward Primer
caagcagatctcagtggctg

SEQ ID NO: 22504 - DNA, 20 bp, Artificial Sequence
  ALK Forward Primer
tgaagtgactgctccaggtg

SEQ ID NO: 22505 - DNA, 20 bp, Artificial Sequence
  ALK Forward Primer
ggttagggttagggtgcaaa

SEQ ID NO: 22506 - DNA, 20 bp, Artificial Sequence
  ALK Forward Primer
gactgaggatcctgctgagg

SEQ ID NO: 22507 - DNA, 20 bp, Artificial Sequence
  ALK Forward Primer
atatccagcacctcaaagcc

SEQ ID NO: 22508 - DNA, 20 bp, Artificial Sequence
  ALK Forward Primer
tggaacaggtgggttctagg

SEQ ID NO: 22509 - DNA, 20 bp, Artificial Sequence
  ALK Forward Primer
cttcaccttcctgagccaga

SEQ ID NO: 22510 - DNA, 20 bp, Artificial Sequence
  ALK Forward Primer
gtggtccatttcaactgcct

SEQ ID NO: 22511 - DNA, 20 bp, Artificial Sequence
  ALK Forward Primer
tgtgttgctgtaggcacctc

SEQ ID NO: 22512 - DNA, 26 bp, Artificial Sequence
  ALK Forward Primer
gctactttcttttggaagtagtaggg

SEQ ID NO: 22513 - DNA, 20 bp, Artificial Sequence
  ALK Forward Primer
tttctgtggctgcaaatgac

SEQ ID NO: 22514 - DNA, 20 bp, Artificial Sequence
  ALK Forward Primer
gcgagtgctctgtcaatgtt

SEQ ID NO: 22515 - DNA, 20 bp, Artificial Sequence
  ALK Forward Primer
gttgtgtttccccttgtgct

SEQ ID NO: 22516 - DNA, 20 bp, Artificial Sequence
  ALK Forward Primer
atgcgcacctgaatttgtct

SEQ ID NO: 22517 - DNA, 20 bp, Artificial Sequence
  ALK Forward Primer
gctggaccatgagaacttcc

SEQ ID NO: 22518 - DNA, 20 bp, Artificial Sequence
  ALK Forward Primer
gggcaagggagaaaacatct

SEQ ID NO: 22519 - DNA, 22 bp, Artificial Sequence
  ALK Forward Primer
ccttgacatctgtgaggactga

SEQ ID NO: 22520 - DNA, 20 bp, Artificial Sequence
  ALK Forward Primer
taaatgaagagccacagggg

SEQ ID NO: 22521 - DNA, 20 bp, Artificial Sequence
  ALK Forward Primer
ttcagggcaaagaagtccac

SEQ ID NO: 22522 - DNA, 21 bp, Artificial Sequence
  ALK Forward Primer
tgtttaaggcaaatgcagctc

SEQ ID NO: 22523 - DNA, 20 bp, Artificial Sequence
  ALK Forward Primer
cgaagcatgtattttggggt

SEQ ID NO: 22524 - DNA, 20 bp, Artificial Sequence
  ALK Forward Primer
gacctgtgcattgcttctga

SEQ ID NO: 22525 - DNA, 19 bp, Artificial Sequence
  ALK Forward Primer
ggtgggtgtctgctgaatg

SEQ ID NO: 22526 - DNA, 20 bp, Artificial Sequence
  ALK Forward Primer
aaaggagggctttcggttta

SEQ ID NO: 22527 - DNA, 20 bp, Artificial Sequence
  ALK Forward Primer
ggcccttgacaatgatttcc

SEQ ID NO: 22528 - DNA, 20 bp, Artificial Sequence
  ALK Forward Primer
gccaaaaacccagtgaaaaa

SEQ ID NO: 22529 - DNA, 20 bp, Artificial Sequence
  ALK Forward Primer
ccctcatttgcctgatgact

SEQ ID NO: 22530 - DNA, 20 bp, Artificial Sequence
  ALK Forward Primer
gaattgggagctgagtcctg

SEQ ID NO: 22531 - DNA, 20 bp, Artificial Sequence
  ALK Forward Primer
caccctccttggagaagtga

SEQ ID NO: 22532 - DNA, 21 bp, Artificial Sequence
  ALK Forward Primer
cacactggccagatagtgaaa

SEQ ID NO: 22533 - DNA, 20 bp, Artificial Sequence
  ALK Forward Primer
acaacacgtgaggaccatga

SEQ ID NO: 22534 - DNA, 20 bp, Artificial Sequence
  ALK Forward Primer
tgagaaggatgcatgcagag

SEQ ID NO: 22535 - DNA, 22 bp, Artificial Sequence
  ALK Forward Primer
cgttaaatacaaccccaagaaa

SEQ ID NO: 22536 - DNA, 20 bp, Artificial Sequence
  ALK Forward Primer
gatgctctagggatgcgaag

SEQ ID NO: 22537 - DNA, 20 bp, Artificial Sequence
  ALK Forward Primer
gcaatgcagaaatgcagaaa

SEQ ID NO: 22538 - DNA, 20 bp, Artificial Sequence
  ALK Forward Primer
catgataatgacgccttccc

SEQ ID NO: 22539 - DNA, 20 bp, Artificial Sequence
  ALK Forward Primer
gtttaaaatgcaggttggca

SEQ ID NO: 22540 - DNA, 20 bp, Artificial Sequence
  ALK Forward Primer
aactcacgggtgagatcgac

SEQ ID NO: 22541 - DNA, 20 bp, Artificial Sequence
  ALK Forward Primer
aaagaactgagcctgtggga

SEQ ID NO: 22542 - DNA, 20 bp, Artificial Sequence
  ALK Forward Primer
gtttcaggtcgaaaggggat

SEQ ID NO: 22543 - DNA, 20 bp, Artificial Sequence
  ALK Forward Primer
ctggacctcctgctctcatc

SEQ ID NO: 22544 - DNA, 20 bp, Artificial Sequence
  ALK Forward Primer
atttgggggttttggagaag

SEQ ID NO: 22545 - DNA, 20 bp, Artificial Sequence
  ALK Forward Primer
gtcagaggtgggttgtgctt

SEQ ID NO: 22546 - DNA, 20 bp, Artificial Sequence
  ALK Forward Primer
agagtgacccttgtgatggg

SEQ ID NO: 22547 - DNA, 20 bp, Artificial Sequence
  ALK Forward Primer
ttttggattaggtcccatgc

SEQ ID NO: 22548 - DNA, 20 bp, Artificial Sequence
  ALK Forward Primer
ccaggtgatcattttgcctt

SEQ ID NO: 22549 - DNA, 20 bp, Artificial Sequence
  ALK Forward Primer
gaaactgaaatgtggccgtt

SEQ ID NO: 22550 - DNA, 20 bp, Artificial Sequence
  ALK Forward Primer
aattctggggctgggataag

SEQ ID NO: 22551 - DNA, 20 bp, Artificial Sequence
  ALK Forward Primer
catcctccacattttgctca

SEQ ID NO: 22552 - DNA, 20 bp, Artificial Sequence
  ALK Forward Primer
tcttgcaaagcagccctatt

SEQ ID NO: 22553 - DNA, 20 bp, Artificial Sequence
  ALK Forward Primer
actttcgagggtcagctcaa

SEQ ID NO: 22554 - DNA, 20 bp, Artificial Sequence
  ALK Forward Primer
ccctggcctaatacactgga

SEQ ID NO: 22555 - DNA, 20 bp, Artificial Sequence
  ALK Forward Primer
tggggatgaggctgtaaaac

SEQ ID NO: 22556 - DNA, 20 bp, Artificial Sequence
  ALK Forward Primer
gtgggtggttgcaaagttct

SEQ ID NO: 22557 - DNA, 20 bp, Artificial Sequence
  ALK Forward Primer
cggtggtgcttgttacactg

SEQ ID NO: 22558 - DNA, 20 bp, Artificial Sequence
  ALK Forward Primer
tgtcaaattccgagtccaca

SEQ ID NO: 22559 - DNA, 20 bp, Artificial Sequence
  ALK Forward Primer
aagactcctgcaagtgggaa

SEQ ID NO: 22560 - DNA, 21 bp, Artificial Sequence
  ALK Forward Primer
catgcgcatatactcctgtca

SEQ ID NO: 22561 - DNA, 20 bp, Artificial Sequence
  ALK Forward Primer
ctccagtgcagacatccctt

SEQ ID NO: 22562 - DNA, 20 bp, Artificial Sequence
  ALK Forward Primer
agcactaaatggcatcctgg

SEQ ID NO: 22563 - DNA, 20 bp, Artificial Sequence
  ALK Forward Primer
cccctcaggtagtgtctgct

SEQ ID NO: 22564 - DNA, 20 bp, Artificial Sequence
  ALK Forward Primer
gtacttgcttccagttgggg

SEQ ID NO: 22565 - DNA, 20 bp, Artificial Sequence
  ALK Forward Primer
gcaattattgagcccagagg

SEQ ID NO: 22566 - DNA, 20 bp, Artificial Sequence
  ALK Forward Primer
acagctgctctgggtcagat

SEQ ID NO: 22567 - DNA, 20 bp, Artificial Sequence
  ALK Forward Primer
ggcgagtcactccacttctt

SEQ ID NO: 22568 - DNA, 20 bp, Artificial Sequence
  ALK Forward Primer
ggtctgggctatgcatctgt

SEQ ID NO: 22569 - DNA, 20 bp, Artificial Sequence
  ALK Forward Primer
ttctgtttctgccaccctct

SEQ ID NO: 22570 - DNA, 20 bp, Artificial Sequence
  ALK Forward Primer
atccagcatgtggagaacct

SEQ ID NO: 22571 - DNA, 20 bp, Artificial Sequence
  ALK Forward Primer
agacagtctctgccctggag

SEQ ID NO: 22572 - DNA, 20 bp, Artificial Sequence
  ALK Forward Primer
aggggacgaatatgggattc

SEQ ID NO: 22573 - DNA, 20 bp, Artificial Sequence
  ALK Forward Primer
tgtttctggcatgctgtctc

SEQ ID NO: 22574 - DNA, 20 bp, Artificial Sequence
  ALK Forward Primer
actgggagaggcagagaggt

SEQ ID NO: 22575 - DNA, 20 bp, Artificial Sequence
  ALK Forward Primer
tggtccacttcctgctcttt

SEQ ID NO: 22576 - DNA, 20 bp, Artificial Sequence
  ALK Forward Primer
cgaccttgggacaagtcaac

SEQ ID NO: 22577 - DNA, 20 bp, Artificial Sequence
  ALK Forward Primer
atattcccagcctgtctcca

SEQ ID NO: 22578 - DNA, 20 bp, Artificial Sequence
  ALK Forward Primer
gcacattctggttttgtcca

SEQ ID NO: 22579 - DNA, 20 bp, Artificial Sequence
  ALK Forward Primer
agggctatgccctcttccta

SEQ ID NO: 22580 - DNA, 22 bp, Artificial Sequence
  ALK Forward Primer
tgaagtcagtgttcaatcgagg

SEQ ID NO: 22581 - DNA, 20 bp, Artificial Sequence
  ALK Forward Primer
ctgagaagggaggcattctg

SEQ ID NO: 22582 - DNA, 20 bp, Artificial Sequence
  ALK Forward Primer
atgccactcgtcttgtttcc

SEQ ID NO: 22583 - DNA, 20 bp, Artificial Sequence
  ALK Forward Primer
ggatgccaaaaattacacgg

SEQ ID NO: 22584 - DNA, 21 bp, Artificial Sequence
  ALK Forward Primer
ttttgctgagttttgcctttc

SEQ ID NO: 22585 - DNA, 25 bp, Artificial Sequence
  ALK Forward Primer
tgaaaggagttaaattggatgatct

SEQ ID NO: 22586 - DNA, 20 bp, Artificial Sequence
  ALK Forward Primer
tctccctgcgagtaggtcat

SEQ ID NO: 22587 - DNA, 20 bp, Artificial Sequence
  ALK Forward Primer
aagcaggtccctttcagaca

SEQ ID NO: 22588 - DNA, 20 bp, Artificial Sequence
  ALK Forward Primer
cagctagtaggctgggttgg

SEQ ID NO: 22589 - DNA, 20 bp, Artificial Sequence
  ALK Forward Primer
ttcccagtctctgcaaggtc

SEQ ID NO: 22590 - DNA, 20 bp, Artificial Sequence
  ALK Forward Primer
gcaggatgcaacatgaggta

SEQ ID NO: 22591 - DNA, 21 bp, Artificial Sequence
  ALK Forward Primer
tgagctatcctgagagccaaa

SEQ ID NO: 22592 - DNA, 20 bp, Artificial Sequence
  ALK Forward Primer
ctgtgatcaccaagtggacg

SEQ ID NO: 22593 - DNA, 20 bp, Artificial Sequence
  ALK Forward Primer
ttggattcgattcgtccttt

SEQ ID NO: 22594 - DNA, 20 bp, Artificial Sequence
  ALK Forward Primer
ctggctggaatggagatcag

SEQ ID NO: 22595 - DNA, 22 bp, Artificial Sequence
  ALK Forward Primer
tccaactcctgttatgtaggga

SEQ ID NO: 22596 - DNA, 20 bp, Artificial Sequence
  ALK Forward Primer
gatttttccttccagcctcc

SEQ ID NO: 22597 - DNA, 20 bp, Artificial Sequence
  ALK Forward Primer
aaccacacggaggagaaatg

SEQ ID NO: 22598 - DNA, 20 bp, Artificial Sequence
  ALK Forward Primer
atccacaaggccaacatagc

SEQ ID NO: 22599 - DNA, 20 bp, Artificial Sequence
  ALK Forward Primer
agcatgctgacagctgagaa

SEQ ID NO: 22600 - DNA, 20 bp, Artificial Sequence
  ALK Forward Primer
ccattctgcaaatcggaaac

SEQ ID NO: 22601 - DNA, 21 bp, Artificial Sequence
  ALK Forward Primer
gccaggtagtctttttggagc

SEQ ID NO: 22602 - DNA, 21 bp, Artificial Sequence
  ALK Forward Primer
gcttcctgaggtgctagtctg

SEQ ID NO: 22603 - DNA, 20 bp, Artificial Sequence
  ALK Forward Primer
tccttaaggggtccaggttt

SEQ ID NO: 22604 - DNA, 20 bp, Artificial Sequence
  ALK Forward Primer
cacctcttgtgtgccttagc

SEQ ID NO: 22605 - DNA, 20 bp, Artificial Sequence
  ALK Forward Primer
agacagtgtccactggggag

SEQ ID NO: 22606 - DNA, 20 bp, Artificial Sequence
  ALK Forward Primer
ggaggttttggctgcattta

SEQ ID NO: 22607 - DNA, 21 bp, Artificial Sequence
  ALK Forward Primer
tttggggtgtccaatagatca

SEQ ID NO: 22608 - DNA, 24 bp, Artificial Sequence
  ALK Forward Primer
tggctacataatagccactgatct

SEQ ID NO: 22609 - DNA, 20 bp, Artificial Sequence
  ALK Forward Primer
gtgctagagacacaacggca

SEQ ID NO: 22610 - DNA, 20 bp, Artificial Sequence
  ALK Forward Primer
cctgctctctcttttcccct

SEQ ID NO: 22611 - DNA, 20 bp, Artificial Sequence
  ALK Forward Primer
ttgtgagggagttcaagcct

SEQ ID NO: 22612 - DNA, 20 bp, Artificial Sequence
  ALK Forward Primer
actgtggcgcaacatttacc

SEQ ID NO: 22613 - DNA, 20 bp, Artificial Sequence
  ALK Forward Primer
acaaagaaatgaatggggca

SEQ ID NO: 22614 - DNA, 20 bp, Artificial Sequence
  ALK Forward Primer
tggagatgccagacacaaga

SEQ ID NO: 22615 - DNA, 20 bp, Artificial Sequence
  ALK Forward Primer
gaggaccacagtgtgcaaga

SEQ ID NO: 22616 - DNA, 20 bp, Artificial Sequence
  ALK Forward Primer
ataccattgccactgcaagc

SEQ ID NO: 22617 - DNA, 20 bp, Artificial Sequence
  ALK Forward Primer
tccattttctccccttgaca

SEQ ID NO: 22618 - DNA, 20 bp, Artificial Sequence
  ALK Forward Primer
tccttcccagctgtaccatc

SEQ ID NO: 22619 - DNA, 20 bp, Artificial Sequence
  ALK Forward Primer
aaaaggcaaagcatggagaa

SEQ ID NO: 22620 - DNA, 20 bp, Artificial Sequence
  ALK Forward Primer
aatgagacggaggctagggt

SEQ ID NO: 22621 - DNA, 20 bp, Artificial Sequence
  ALK Forward Primer
gccagtgtttgggacttgtt

SEQ ID NO: 22622 - DNA, 20 bp, Artificial Sequence
  ALK Forward Primer
ccatgaaccctcctactgga

SEQ ID NO: 22623 - DNA, 20 bp, Artificial Sequence
  ALK Forward Primer
ccctctcccaatctttttcc

SEQ ID NO: 22624 - DNA, 20 bp, Artificial Sequence
  ALK Forward Primer
ttggtcaccttacctcccac

SEQ ID NO: 22625 - DNA, 24 bp, Artificial Sequence
  ALK Forward Primer
tctctactacttggcattcattca

SEQ ID NO: 22626 - DNA, 20 bp, Artificial Sequence
  ALK Forward Primer
ttctctctgcctattcccca

SEQ ID NO: 22627 - DNA, 23 bp, Artificial Sequence
  ALK Forward Primer
gctatcatattgatgttcgctca

SEQ ID NO: 22628 - DNA, 20 bp, Artificial Sequence
  ALK Forward Primer
aatccttcccctcaaaccac

SEQ ID NO: 22629 - DNA, 19 bp, Artificial Sequence
  ALK Forward Primer
ccagagctcttggggagtc

SEQ ID NO: 22630 - DNA, 21 bp, Artificial Sequence
  ALK Forward Primer
ttgcaggtgagaagggaataa

SEQ ID NO: 22631 - DNA, 20 bp, Artificial Sequence
  ALK Forward Primer
actgatttggggaggagagc

SEQ ID NO: 22632 - DNA, 20 bp, Artificial Sequence
  ALK Forward Primer
caattgtcaaggactgcctg

SEQ ID NO: 22633 - DNA, 20 bp, Artificial Sequence
  ALK Forward Primer
aagcaccactctttgatgcc

SEQ ID NO: 22634 - DNA, 20 bp, Artificial Sequence
  ALK Forward Primer
cactcaacccagtttgtccc

SEQ ID NO: 22635 - DNA, 20 bp, Artificial Sequence
  ALK Forward Primer
ggatggtgtctcccttagca

SEQ ID NO: 22636 - DNA, 20 bp, Artificial Sequence
  ALK Forward Primer
aaagggccaattacctgctt

SEQ ID NO: 22637 - DNA, 20 bp, Artificial Sequence
  ALK Forward Primer
agctcgctggtttcatcatt

SEQ ID NO: 22638 - DNA, 21 bp, Artificial Sequence
  ALK Forward Primer
cacaaattgcccatcaactct

SEQ ID NO: 22639 - DNA, 20 bp, Artificial Sequence
  ALK Forward Primer
cccttagcctttctgagcct

SEQ ID NO: 22640 - DNA, 20 bp, Artificial Sequence
  ALK Forward Primer
gtcccttccaggtcgaagat

SEQ ID NO: 22641 - DNA, 20 bp, Artificial Sequence
  ALK Forward Primer
ggggaagggtttgtttgttt

SEQ ID NO: 22642 - DNA, 20 bp, Artificial Sequence
  ALK Forward Primer
tcttctgaagggcattctgc

SEQ ID NO: 22643 - DNA, 20 bp, Artificial Sequence
  ALK Forward Primer
gaacagtcctacgtggggag

SEQ ID NO: 22644 - DNA, 20 bp, Artificial Sequence
  ALK Forward Primer
tctcatgaataagtcggccc

SEQ ID NO: 22645 - DNA, 20 bp, Artificial Sequence
  ALK Forward Primer
attgtgtgtctcccctgagc

SEQ ID NO: 22646 - DNA, 21 bp, Artificial Sequence
  ALK Forward Primer
tcatccccagaggattaatgt

SEQ ID NO: 22647 - DNA, 20 bp, Artificial Sequence
  ALK Forward Primer
tccgatccccttgtagaaaa

SEQ ID NO: 22648 - DNA, 20 bp, Artificial Sequence
  ALK Forward Primer
actgattcttggctcttccg

SEQ ID NO: 22649 - DNA, 20 bp, Artificial Sequence
  ALK Forward Primer
ataaaatgcagatgctgggg

SEQ ID NO: 22650 - DNA, 20 bp, Artificial Sequence
  ALK Forward Primer
tccagatacctgatggaggc

SEQ ID NO: 22651 - DNA, 20 bp, Artificial Sequence
  ALK Forward Primer
gcttttgtcagatggggaaa

SEQ ID NO: 22652 - DNA, 20 bp, Artificial Sequence
  ALK Forward Primer
agaggtggaggggtttcact

SEQ ID NO: 22653 - DNA, 20 bp, Artificial Sequence
  ALK Forward Primer
tattctttcctgtggcgctt

SEQ ID NO: 22654 - DNA, 20 bp, Artificial Sequence
  ALK Forward Primer
tcgtttggccagtaatgtga

SEQ ID NO: 22655 - DNA, 20 bp, Artificial Sequence
  ALK Forward Primer
aacatacgagtcagccccac

SEQ ID NO: 22656 - DNA, 21 bp, Artificial Sequence
  ALK Forward Primer
tgtctgcacctgaatcctctt

SEQ ID NO: 22657 - DNA, 20 bp, Artificial Sequence
  ALK Forward Primer
aggtagctgtcttgccatgc

SEQ ID NO: 22658 - DNA, 20 bp, Artificial Sequence
  ALK Forward Primer
ttgcctagtgggtgggtaag

SEQ ID NO: 22659 - DNA, 20 bp, Artificial Sequence
  ALK Forward Primer
acggatgtttgttctgtccc

SEQ ID NO: 22660 - DNA, 20 bp, Artificial Sequence
  ALK Forward Primer
cactgtctggactccccagt

SEQ ID NO: 22661 - DNA, 20 bp, Artificial Sequence
  ALK Forward Primer
tcaccaaaccttccttcacc

SEQ ID NO: 22662 - DNA, 20 bp, Artificial Sequence
  ALK Forward Primer
gggccagccctctaattgta

SEQ ID NO: 22663 - DNA, 20 bp, Artificial Sequence
  ALK Forward Primer
ggaggtgagagaaaaaggca

SEQ ID NO: 22664 - DNA, 20 bp, Artificial Sequence
  ALK Forward Primer
gggtctgatgtttgcttgct

SEQ ID NO: 22665 - DNA, 20 bp, Artificial Sequence
  ALK Forward Primer
gccctccttcctgctaaaat

SEQ ID NO: 22666 - DNA, 20 bp, Artificial Sequence
  ALK Forward Primer
ccaaatccgacagcaatttt

SEQ ID NO: 22667 - DNA, 20 bp, Artificial Sequence
  ALK Forward Primer
gttgcactgtgcttcgaaaa

SEQ ID NO: 22668 - DNA, 20 bp, Artificial Sequence
  ALK Forward Primer
caagtttcttgagggcaagg

SEQ ID NO: 22669 - DNA, 20 bp, Artificial Sequence
  ALK Forward Primer
ataccccagggacacacaaa

SEQ ID NO: 22670 - DNA, 20 bp, Artificial Sequence
  ALK Forward Primer
acacaatagggccatgaagc

SEQ ID NO: 22671 - DNA, 20 bp, Artificial Sequence
  ALK Forward Primer
gtgtgaagagagcccagagg

SEQ ID NO: 22672 - DNA, 20 bp, Artificial Sequence
  ALK Forward Primer
taactggctgaaacgctgtg

SEQ ID NO: 22673 - DNA, 20 bp, Artificial Sequence
  ALK Forward Primer
actgaagttctgggctgtgc

SEQ ID NO: 22674 - DNA, 20 bp, Artificial Sequence
  ALK Forward Primer
gctgaatggtgtttctgggt

SEQ ID NO: 22675 - DNA, 20 bp, Artificial Sequence
  ALK Forward Primer
atggacaggtttccatctgc

SEQ ID NO: 22676 - DNA, 22 bp, Artificial Sequence
  ALK Forward Primer
ttctcatggatgaggaaactga

SEQ ID NO: 22677 - DNA, 26 bp, Artificial Sequence
  ALK Forward Primer
gaatgacaaatggagacatgtaatct

SEQ ID NO: 22678 - DNA, 20 bp, Artificial Sequence
  ALK Forward Primer
tgcttcaaaatcaaccagga

SEQ ID NO: 22679 - DNA, 20 bp, Artificial Sequence
  ALK Forward Primer
cagacctgggtgatagtggc

SEQ ID NO: 22680 - DNA, 20 bp, Artificial Sequence
  ALK Forward Primer
ggcaggaatagggacagaca

SEQ ID NO: 22681 - DNA, 20 bp, Artificial Sequence
  ALK Forward Primer
tgtgctgagggagaattttt

SEQ ID NO: 22682 - DNA, 20 bp, Artificial Sequence
  ALK Forward Primer
aaaaagcagcctcagaaagg

SEQ ID NO: 22683 - DNA, 20 bp, Artificial Sequence
  ALK Forward Primer
tgctttatcgtggtggtctg

SEQ ID NO: 22684 - DNA, 20 bp, Artificial Sequence
  ALK Forward Primer
gcacatttgggctgattgta

SEQ ID NO: 22685 - DNA, 20 bp, Artificial Sequence
  ALK Forward Primer
tgttgcagcaagaagaagga

SEQ ID NO: 22686 - DNA, 20 bp, Artificial Sequence
  ALK Forward Primer
tattgcctggaggcagtttc

SEQ ID NO: 22687 - DNA, 20 bp, Artificial Sequence
  ALK Forward Primer
gtcccaaccagccaaagtag

SEQ ID NO: 22688 - DNA, 20 bp, Artificial Sequence
  ALK Forward Primer
gcaaaattcagccttgatga

SEQ ID NO: 22689 - DNA, 20 bp, Artificial Sequence
  ALK Forward Primer
aggagacatgggcaaatcag

SEQ ID NO: 22690 - DNA, 20 bp, Artificial Sequence
  ALK Forward Primer
ggcagcagactcattgtcag

SEQ ID NO: 22691 - DNA, 20 bp, Artificial Sequence
  ALK Forward Primer
gccttgagggtttgagactg

SEQ ID NO: 22692 - DNA, 20 bp, Artificial Sequence
  ALK Forward Primer
ccgcatctccagttgtttct

SEQ ID NO: 22693 - DNA, 20 bp, Artificial Sequence
  ALK Forward Primer
atatggcagtgaacaagccc

SEQ ID NO: 22694 - DNA, 20 bp, Artificial Sequence
  ALK Forward Primer
aggcacctggtcaatgagat

SEQ ID NO: 22695 - DNA, 20 bp, Artificial Sequence
  ALK Forward Primer
ttttgataagggcccacttg

SEQ ID NO: 22696 - DNA, 20 bp, Artificial Sequence
  ALK Forward Primer
agcctcccaacgagttttta

SEQ ID NO: 22697 - DNA, 22 bp, Artificial Sequence
  ALK Forward Primer
tggaggcaacagtcatagaaga

SEQ ID NO: 22698 - DNA, 23 bp, Artificial Sequence
  ALK Forward Primer
atggtcactagggtaaccatgaa

SEQ ID NO: 22699 - DNA, 26 bp, Artificial Sequence
  ALK Forward Primer
tttatacaatgaaatagtctgcaaca

SEQ ID NO: 22700 - DNA, 20 bp, Artificial Sequence
  ALK Forward Primer
tgtttcacatcttggtccga

SEQ ID NO: 22701 - DNA, 20 bp, Artificial Sequence
  ALK Forward Primer
ggggaggtttagttcaggct

SEQ ID NO: 22702 - DNA, 20 bp, Artificial Sequence
  ALK Forward Primer
cctgcagaagcatcagacaa

SEQ ID NO: 22703 - DNA, 20 bp, Artificial Sequence
  ALK Forward Primer
ataggccccaagaggtgaac

SEQ ID NO: 22704 - DNA, 20 bp, Artificial Sequence
  ALK Forward Primer
tcctcattgttcccctgaag

SEQ ID NO: 22705 - DNA, 21 bp, Artificial Sequence
  ALK Forward Primer
ctctgagtgcctgaagaggaa

SEQ ID NO: 22706 - DNA, 20 bp, Artificial Sequence
  ALK Forward Primer
ccagggtttgttgctcactt

SEQ ID NO: 22707 - DNA, 23 bp, Artificial Sequence
  ALK Forward Primer
gggacataaaattaccacaatca

SEQ ID NO: 22708 - DNA, 20 bp, Artificial Sequence
  ALK Forward Primer
tgtcggtggtagaagcacag

SEQ ID NO: 22709 - DNA, 20 bp, Artificial Sequence
  ALK Forward Primer
gcccttttatcgttggttga

SEQ ID NO: 22710 - DNA, 20 bp, Artificial Sequence
  ALK Forward Primer
atttgggcacgtgaatagga

SEQ ID NO: 22711 - DNA, 20 bp, Artificial Sequence
  ALK Forward Primer
atggcaacacttggctctct

SEQ ID NO: 22712 - DNA, 20 bp, Artificial Sequence
  ALK Forward Primer
gcaacaagaaatgtggggac

SEQ ID NO: 22713 - DNA, 20 bp, Artificial Sequence
  ALK Forward Primer
gatgtatgctcctccatcca

SEQ ID NO: 22714 - DNA, 20 bp, Artificial Sequence
  ALK Forward Primer
cgtataaagggctttgcagc

SEQ ID NO: 22715 - DNA, 20 bp, Artificial Sequence
  ALK Forward Primer
ctgccaggtgattgaggatt

SEQ ID NO: 22716 - DNA, 20 bp, Artificial Sequence
  ALK Forward Primer
ccctgcaaagaataggaccc

SEQ ID NO: 22717 - DNA, 20 bp, Artificial Sequence
  ALK Forward Primer
aatgatggctcaccctgaag

SEQ ID NO: 22718 - DNA, 21 bp, Artificial Sequence
  ALK Forward Primer
cgcttggtgattttggaatta

SEQ ID NO: 22719 - DNA, 20 bp, Artificial Sequence
  ALK Forward Primer
ggttcagggagttgagcctt

SEQ ID NO: 22720 - DNA, 20 bp, Artificial Sequence
  ALK Forward Primer
ttcagcacagaaaaatcccc

SEQ ID NO: 22721 - DNA, 20 bp, Artificial Sequence
  ALK Forward Primer
ggggatggagctgtttgtaa

SEQ ID NO: 22722 - DNA, 20 bp, Artificial Sequence
  ALK Forward Primer
ggcatgatcctttgaaccat

SEQ ID NO: 22723 - DNA, 20 bp, Artificial Sequence
  ALK Forward Primer
cctggaaactacaagctccc

SEQ ID NO: 22724 - DNA, 20 bp, Artificial Sequence
  ALK Forward Primer
ctgggacttctctctccagc

SEQ ID NO: 22725 - DNA, 20 bp, Artificial Sequence
  ALK Forward Primer
gcagtggacctacgaggaaa

SEQ ID NO: 22726 - DNA, 20 bp, Artificial Sequence
  ALK Forward Primer
aggggtaggatcaagctggt

SEQ ID NO: 22727 - DNA, 20 bp, Artificial Sequence
  ALK Forward Primer
acctgggaaaagtgacctga

SEQ ID NO: 22728 - DNA, 20 bp, Artificial Sequence
  ALK Forward Primer
tggatctgcctgcttttctt

SEQ ID NO: 22729 - DNA, 23 bp, Artificial Sequence
  ALK Forward Primer
tccttcaagaaatacatccttca

SEQ ID NO: 22730 - DNA, 20 bp, Artificial Sequence
  ALK Forward Primer
tcctgctgcctagttggagt

SEQ ID NO: 22731 - DNA, 23 bp, Artificial Sequence
  ALK Forward Primer
acctgttctcatttcatttcagc

SEQ ID NO: 22732 - DNA, 20 bp, Artificial Sequence
  ALK Forward Primer
ccttttgcttgatgggtgtt

SEQ ID NO: 22733 - DNA, 20 bp, Artificial Sequence
  ALK Forward Primer
gtggttgtgggagctgatct

SEQ ID NO: 22734 - DNA, 21 bp, Artificial Sequence
  ALK Forward Primer
tgtgctgcatttagagcagag

SEQ ID NO: 22735 - DNA, 20 bp, Artificial Sequence
  ALK Forward Primer
tctgggcatttttctgaacc

SEQ ID NO: 22736 - DNA, 25 bp, Artificial Sequence
  ALK Forward Primer
ccagtaaattaaaaacaagaagcaa

SEQ ID NO: 22737 - DNA, 20 bp, Artificial Sequence
  ALK Forward Primer
atggcgaatacaatgccaac

SEQ ID NO: 22738 - DNA, 20 bp, Artificial Sequence
  ALK Forward Primer
taggggagcttgaatggatg

SEQ ID NO: 22739 - DNA, 20 bp, Artificial Sequence
  ALK Forward Primer
tccattttgccctagctcac

SEQ ID NO: 22740 - DNA, 20 bp, Artificial Sequence
  ALK Forward Primer
acgtgcacacagaaaagcac

SEQ ID NO: 22741 - DNA, 20 bp, Artificial Sequence
  ALK Forward Primer
catgttccaccaggtgctta

SEQ ID NO: 22742 - DNA, 21 bp, Artificial Sequence
  ALK Forward Primer
tccagatagctttcatggtca

SEQ ID NO: 22743 - DNA, 20 bp, Artificial Sequence
  ALK Forward Primer
aacacttgttatcacggccc

SEQ ID NO: 22744 - DNA, 24 bp, Artificial Sequence
  ALK Forward Primer
tgatgaacgactaactagagcaga

SEQ ID NO: 22745 - DNA, 20 bp, Artificial Sequence
  ALK Forward Primer
ccccaaatagcaaagcatga

SEQ ID NO: 22746 - DNA, 20 bp, Artificial Sequence
  ALK Forward Primer
agaaagccaatagcaggcaa

SEQ ID NO: 22747 - DNA, 20 bp, Artificial Sequence
  ALK Forward Primer
aattgtccgtgccaagtcag

SEQ ID NO: 22748 - DNA, 24 bp, Artificial Sequence
  ALK Forward Primer
ttttgatgtagtgatgagcttcag

SEQ ID NO: 22749 - DNA, 20 bp, Artificial Sequence
  ALK Forward Primer
cgtcaagcctgtgtacctca

SEQ ID NO: 22750 - DNA, 20 bp, Artificial Sequence
  ALK Forward Primer
gttagtgccagcaggagagg

SEQ ID NO: 22751 - DNA, 20 bp, Artificial Sequence
  ALK Forward Primer
tatcatcctgggtctggctc

SEQ ID NO: 22752 - DNA, 20 bp, Artificial Sequence
  ALK Forward Primer
ggaagacatggagctagcca

SEQ ID NO: 22753 - DNA, 20 bp, Artificial Sequence
  ALK Forward Primer
ttctgcacacggtcagtagg

SEQ ID NO: 22754 - DNA, 20 bp, Artificial Sequence
  ALK Forward Primer
acttggcaggtcaaggaatg

SEQ ID NO: 22755 - DNA, 20 bp, Artificial Sequence
  ALK Forward Primer
ccaaaggcgtacacatcaga

SEQ ID NO: 22756 - DNA, 20 bp, Artificial Sequence
  ALK Forward Primer
aagcacataggtgtgccctc

SEQ ID NO: 22757 - DNA, 20 bp, Artificial Sequence
  ALK Forward Primer
ggggtggatgcagaaagata

SEQ ID NO: 22758 - DNA, 24 bp, Artificial Sequence
  ALK Forward Primer
tgcagtataaatggcagttttgtt

SEQ ID NO: 22759 - DNA, 20 bp, Artificial Sequence
  ALK Forward Primer
tcagtttggggctctgagat

SEQ ID NO: 22760 - DNA, 21 bp, Artificial Sequence
  ALK Forward Primer
catttggcatctggaagagaa

SEQ ID NO: 22761 - DNA, 20 bp, Artificial Sequence
  ALK Forward Primer
agatcagagcaagggtggag

SEQ ID NO: 22762 - DNA, 20 bp, Artificial Sequence
  ALK Forward Primer
ggttttcttaccctccccac

SEQ ID NO: 22763 - DNA, 20 bp, Artificial Sequence
  ALK Forward Primer
aattatgctggcacatccaa

SEQ ID NO: 22764 - DNA, 21 bp, Artificial Sequence
  ALK Forward Primer
gccatgtagggatcaaatgaa

SEQ ID NO: 22765 - DNA, 20 bp, Artificial Sequence
  ALK Forward Primer
tttttcatcaggcagtgtgg

SEQ ID NO: 22766 - DNA, 20 bp, Artificial Sequence
  ALK Forward Primer
acactttgcccatggaagac

SEQ ID NO: 22767 - DNA, 20 bp, Artificial Sequence
  ALK Forward Primer
aatacctggctccctcccta

SEQ ID NO: 22768 - DNA, 20 bp, Artificial Sequence
  ALK Forward Primer
ggcaaatcccttgaagacag

SEQ ID NO: 22769 - DNA, 20 bp, Artificial Sequence
  ALK Forward Primer
ttcttcctctcccccactct

SEQ ID NO: 22770 - DNA, 20 bp, Artificial Sequence
  ALK Forward Primer
agggtcttggtatgtgggtg

SEQ ID NO: 22771 - DNA, 20 bp, Artificial Sequence
  ALK Forward Primer
ttgctcatttgtctgccaag

SEQ ID NO: 22772 - DNA, 20 bp, Artificial Sequence
  ALK Forward Primer
tctcctccccatcaaaaaga

SEQ ID NO: 22773 - DNA, 20 bp, Artificial Sequence
  ALK Forward Primer
ctacgttcaggttgagggct

SEQ ID NO: 22774 - DNA, 20 bp, Artificial Sequence
  ALK Forward Primer
tgactgattgagtcttgcgg

SEQ ID NO: 22775 - DNA, 20 bp, Artificial Sequence
  ALK Forward Primer
gagaagcatgttcctctggc

SEQ ID NO: 22776 - DNA, 20 bp, Artificial Sequence
  ALK Forward Primer
gcattgctgagaagggagac

SEQ ID NO: 22777 - DNA, 20 bp, Artificial Sequence
  ALK Forward Primer
tctttcaagtccccaccatc

SEQ ID NO: 22778 - DNA, 20 bp, Artificial Sequence
  ALK Forward Primer
ggatgaatgaatgaacccaa

SEQ ID NO: 22779 - DNA, 20 bp, Artificial Sequence
  ALK Forward Primer
gccccatccctcattcttat

SEQ ID NO: 22780 - DNA, 20 bp, Artificial Sequence
  ALK Forward Primer
gaatgcatgcagagacctcc

SEQ ID NO: 22781 - DNA, 20 bp, Artificial Sequence
  ALK Forward Primer
cagggactgctcttccactt

SEQ ID NO: 22782 - DNA, 20 bp, Artificial Sequence
  ALK Forward Primer
ctgggcaaatgactttgctt

SEQ ID NO: 22783 - DNA, 20 bp, Artificial Sequence
  ALK Forward Primer
agctgagctccaaaggatga

SEQ ID NO: 22784 - DNA, 20 bp, Artificial Sequence
  ALK Forward Primer
tattatgctggctgctgtgc

SEQ ID NO: 22785 - DNA, 20 bp, Artificial Sequence
  ALK Forward Primer
ctacttgtggcctgtggtca

SEQ ID NO: 22786 - DNA, 20 bp, Artificial Sequence
  ALK Forward Primer
caatggtgcctgagtgaatg

SEQ ID NO: 22787 - DNA, 20 bp, Artificial Sequence
  ALK Forward Primer
gtgggtggaagaggttgaaa

SEQ ID NO: 22788 - DNA, 20 bp, Artificial Sequence
  ALK Forward Primer
ttcagcagtcagcaacatcc

SEQ ID NO: 22789 - DNA, 20 bp, Artificial Sequence
  ALK Forward Primer
agggatcaaactttgggcat

SEQ ID NO: 22790 - DNA, 20 bp, Artificial Sequence
  ALK Forward Primer
gcctctgtgctcaggatagc

SEQ ID NO: 22791 - DNA, 20 bp, Artificial Sequence
  ALK Forward Primer
aatcagttatcttggccccc

SEQ ID NO: 22792 - DNA, 20 bp, Artificial Sequence
  ALK Forward Primer
gcttttccaccgtcactgat

SEQ ID NO: 22793 - DNA, 20 bp, Artificial Sequence
  ALK Forward Primer
ggcacaacaaatgctgagaa

SEQ ID NO: 22794 - DNA, 20 bp, Artificial Sequence
  ALK Forward Primer
tatgagaagaccaggtgccc

SEQ ID NO: 22795 - DNA, 20 bp, Artificial Sequence
  ALK Forward Primer
aggcttaaggagaacagggg

SEQ ID NO: 22796 - DNA, 20 bp, Artificial Sequence
  ALK Forward Primer
tgccaactgcttcatcaaag

SEQ ID NO: 22797 - DNA, 20 bp, Artificial Sequence
  ALK Forward Primer
gattgcctatgggatcatgg

SEQ ID NO: 22798 - DNA, 20 bp, Artificial Sequence
  ALK Forward Primer
ctgatggcaggtgtttgcta

SEQ ID NO: 22799 - DNA, 20 bp, Artificial Sequence
  ALK Forward Primer
ctttggggaaaccagaaaca

SEQ ID NO: 22800 - DNA, 20 bp, Artificial Sequence
  ALK Forward Primer
gaatcagaggcccaggaata

SEQ ID NO: 22801 - DNA, 21 bp, Artificial Sequence
  ALK Forward Primer
tgaggcaaaacttatgtgcaa

SEQ ID NO: 22802 - DNA, 23 bp, Artificial Sequence
  ALK Forward Primer
tgggaattgaacaatgagaattt

SEQ ID NO: 22803 - DNA, 20 bp, Artificial Sequence
  ALK Forward Primer
ccgtcatttttgcctgtttt

SEQ ID NO: 22804 - DNA, 20 bp, Artificial Sequence
  ALK Forward Primer
tcagtcctctgcctgtcctt

SEQ ID NO: 22805 - DNA, 20 bp, Artificial Sequence
  ALK Forward Primer
ttctgcttgtcccctgttct

SEQ ID NO: 22806 - DNA, 20 bp, Artificial Sequence
  ALK Forward Primer
tgtggttgtgggaaacactt

SEQ ID NO: 22807 - DNA, 20 bp, Artificial Sequence
  ALK Forward Primer
acaggcaagaggggaaagtt

SEQ ID NO: 22808 - DNA, 20 bp, Artificial Sequence
  ALK Forward Primer
caccctcatcttgcctcagt

SEQ ID NO: 22809 - DNA, 20 bp, Artificial Sequence
  ALK Forward Primer
atatgtggtgaggctttgcc

SEQ ID NO: 22810 - DNA, 20 bp, Artificial Sequence
  ALK Forward Primer
atttgacagcaatgagctgg

SEQ ID NO: 22811 - DNA, 20 bp, Artificial Sequence
  ALK Forward Primer
tgtgtcaggcactcttttgg

SEQ ID NO: 22812 - DNA, 20 bp, Artificial Sequence
  ALK Forward Primer
tcaagcagcttttactgggg

SEQ ID NO: 22813 - DNA, 20 bp, Artificial Sequence
  ALK Forward Primer
aaactacagcgttggctggt

SEQ ID NO: 22814 - DNA, 20 bp, Artificial Sequence
  ALK Forward Primer
tcccttctgtgcagtccaat

SEQ ID NO: 22815 - DNA, 20 bp, Artificial Sequence
  ALK Forward Primer
agatgatgtgaaagctgggg

SEQ ID NO: 22816 - DNA, 20 bp, Artificial Sequence
  ALK Forward Primer
aagctagcgaaagggtgagc

SEQ ID NO: 22817 - DNA, 22 bp, Artificial Sequence
  ALK Forward Primer
ttggctatcgttgttaaaagca

SEQ ID NO: 22818 - DNA, 20 bp, Artificial Sequence
  ALK Forward Primer
gagtcaggcaagtcaaagcc

SEQ ID NO: 22819 - DNA, 20 bp, Artificial Sequence
  ALK Forward Primer
ccctggagactgtccgtaag

SEQ ID NO: 22820 - DNA, 20 bp, Artificial Sequence
  ALK Forward Primer
aaggagaaggaggaattggg

SEQ ID NO: 22821 - DNA, 20 bp, Artificial Sequence
  ALK Forward Primer
gtccttcgattggaggttga

SEQ ID NO: 22822 - DNA, 20 bp, Artificial Sequence
  ALK Forward Primer
aaagaacaaatgtggcccag

SEQ ID NO: 22823 - DNA, 20 bp, Artificial Sequence
  ALK Forward Primer
aacgaatcatgggtccagag

SEQ ID NO: 22824 - DNA, 20 bp, Artificial Sequence
  ALK Forward Primer
aaggaacgtcccacagaatg

SEQ ID NO: 22825 - DNA, 20 bp, Artificial Sequence
  ALK Forward Primer
tagggaccctcccttttctc

SEQ ID NO: 22826 - DNA, 20 bp, Artificial Sequence
  ALK Forward Primer
atgaatgcagaggggaactg

SEQ ID NO: 22827 - DNA, 20 bp, Artificial Sequence
  ALK Forward Primer
aactttgccatttattgcgg

SEQ ID NO: 22828 - DNA, 20 bp, Artificial Sequence
  ALK Forward Primer
cctcagcttccccactgtaa

SEQ ID NO: 22829 - DNA, 20 bp, Artificial Sequence
  ALK Forward Primer
ggtccctgttgactgtaggg

SEQ ID NO: 22830 - DNA, 20 bp, Artificial Sequence
  ALK Forward Primer
cccacttgtgctggtgtaaa

SEQ ID NO: 22831 - DNA, 20 bp, Artificial Sequence
  ALK Forward Primer
ggggaggaagaaaccaagag

SEQ ID NO: 22832 - DNA, 20 bp, Artificial Sequence
  ALK Forward Primer
tttttaccatctccctcccc

SEQ ID NO: 22833 - DNA, 20 bp, Artificial Sequence
  ALK Forward Primer
gaactggcagaagctgaagg

SEQ ID NO: 22834 - DNA, 20 bp, Artificial Sequence
  ALK Forward Primer
tgatcttgaacggggcttta

SEQ ID NO: 22835 - DNA, 20 bp, Artificial Sequence
  ALK Forward Primer
tcaactgcaaggctttcttg

SEQ ID NO: 22836 - DNA, 20 bp, Artificial Sequence
  ALK Forward Primer
ttcttctcattcccctgtgg

SEQ ID NO: 22837 - DNA, 20 bp, Artificial Sequence
  ALK Forward Primer
caagtccctcccaagtcttt

SEQ ID NO: 22838 - DNA, 20 bp, Artificial Sequence
  ALK Forward Primer
aatcgctgaaggtccagttc

SEQ ID NO: 22839 - DNA, 20 bp, Artificial Sequence
  ALK Forward Primer
ccttagacagacagcctggg

SEQ ID NO: 22840 - DNA, 20 bp, Artificial Sequence
  ALK Forward Primer
caagcctgggtgtgagtttt

SEQ ID NO: 22841 - DNA, 20 bp, Artificial Sequence
  ALK Forward Primer
tatcatgcaggcaagattcg

SEQ ID NO: 22842 - DNA, 20 bp, Artificial Sequence
  ALK Forward Primer
tatcagtgggccagtaggga

SEQ ID NO: 22843 - DNA, 20 bp, Artificial Sequence
  ALK Forward Primer
gctgggatctttggtcagaa

SEQ ID NO: 22844 - DNA, 20 bp, Artificial Sequence
  ALK Forward Primer
tatcttccgggtctaggggt

SEQ ID NO: 22845 - DNA, 20 bp, Artificial Sequence
  ALK Forward Primer
gctgctgtgggaaaaagtca

SEQ ID NO: 22846 - DNA, 20 bp, Artificial Sequence
  ALK Forward Primer
ttctgctggatctgccacta

SEQ ID NO: 22847 - DNA, 20 bp, Artificial Sequence
  ALK Forward Primer
gaacccaaaaggacctagca

SEQ ID NO: 22848 - DNA, 20 bp, Artificial Sequence
  ALK Forward Primer
tgggcactcatctgtctgtc

SEQ ID NO: 22849 - DNA, 20 bp, Artificial Sequence
  ALK Forward Primer
ctgctcacgacacagtggtt

SEQ ID NO: 22850 - DNA, 20 bp, Artificial Sequence
  ALK Forward Primer
cccataatcagagagcaggc

SEQ ID NO: 22851 - DNA, 20 bp, Artificial Sequence
  ALK Forward Primer
cagctcagtcccaattcctc

SEQ ID NO: 22852 - DNA, 20 bp, Artificial Sequence
  ALK Forward Primer
tccagtttggaccacatcac

SEQ ID NO: 22853 - DNA, 20 bp, Artificial Sequence
  ALK Forward Primer
agaagcctcaagcagcactc

SEQ ID NO: 22854 - DNA, 20 bp, Artificial Sequence
  ALK Forward Primer
ggcatttcagaggcaagaag

SEQ ID NO: 22855 - DNA, 20 bp, Artificial Sequence
  ALK Forward Primer
cagttgggctttttctcctg

SEQ ID NO: 22856 - DNA, 20 bp, Artificial Sequence
  ALK Forward Primer
tggtggttgtagcacaaagc

SEQ ID NO: 22857 - DNA, 20 bp, Artificial Sequence
  ALK Forward Primer
ccactcatgaaatccccact

SEQ ID NO: 22858 - DNA, 20 bp, Artificial Sequence
  ALK Forward Primer
agaaggagaaaggagcctgg

SEQ ID NO: 22859 - DNA, 20 bp, Artificial Sequence
  ALK Forward Primer
gttcgaaccttagctcccct

SEQ ID NO: 22860 - DNA, 20 bp, Artificial Sequence
  ALK Forward Primer
cagtagcacaggccaaatga

SEQ ID NO: 22861 - DNA, 20 bp, Artificial Sequence
  ALK Forward Primer
gcagataacccagtttccca

SEQ ID NO: 22862 - DNA, 20 bp, Artificial Sequence
  ALK Forward Primer
atgggcacagaggaaaagaa

SEQ ID NO: 22863 - DNA, 20 bp, Artificial Sequence
  ALK Forward Primer
tcggtcccttccttactcct

SEQ ID NO: 22864 - DNA, 20 bp, Artificial Sequence
  ALK Forward Primer
ttgagccaggtcttacaggg

SEQ ID NO: 22865 - DNA, 20 bp, Artificial Sequence
  ALK Forward Primer
gtccacacaagggcaagaat

SEQ ID NO: 22866 - DNA, 20 bp, Artificial Sequence
  ALK Forward Primer
tgatgttctcaggttggcag

SEQ ID NO: 22867 - DNA, 20 bp, Artificial Sequence
  ALK Forward Primer
gcatgtaaattctgtccccg

SEQ ID NO: 22868 - DNA, 20 bp, Artificial Sequence
  ALK Forward Primer
ggatggtctagcagcacaca

SEQ ID NO: 22869 - DNA, 20 bp, Artificial Sequence
  ALK Forward Primer
gcagtactgtgcctgctcaa

SEQ ID NO: 22870 - DNA, 20 bp, Artificial Sequence
  ALK Forward Primer
cgattggccaaatactccat

SEQ ID NO: 22871 - DNA, 21 bp, Artificial Sequence
  ALK Forward Primer
ttctttaggttgctgccttca

SEQ ID NO: 22872 - DNA, 22 bp, Artificial Sequence
  ALK Forward Primer
cccaaatcagctgtacttttcc

SEQ ID NO: 22873 - DNA, 20 bp, Artificial Sequence
  ALK Forward Primer
ggtccccacagaatcagttt

SEQ ID NO: 22874 - DNA, 20 bp, Artificial Sequence
  ALK Forward Primer
tgcataatttgcctgatgga

SEQ ID NO: 22875 - DNA, 20 bp, Artificial Sequence
  ALK Forward Primer
acctttttggcacattctgg

SEQ ID NO: 22876 - DNA, 20 bp, Artificial Sequence
  ALK Forward Primer
aatgggttggaatctggaca

SEQ ID NO: 22877 - DNA, 20 bp, Artificial Sequence
  ALK Forward Primer
ctcctggaaacctcctctga

SEQ ID NO: 22878 - DNA, 20 bp, Artificial Sequence
  ALK Forward Primer
agatgcctgcagatgttcct

SEQ ID NO: 22879 - DNA, 20 bp, Artificial Sequence
  ALK Forward Primer
ttggcatgctttgcctaata

SEQ ID NO: 22880 - DNA, 20 bp, Artificial Sequence
  ALK Forward Primer
caccttcattcggaagcact

SEQ ID NO: 22881 - DNA, 20 bp, Artificial Sequence
  ALK Forward Primer
aggggcagagccaataatct

SEQ ID NO: 22882 - DNA, 21 bp, Artificial Sequence
  ALK Forward Primer
tgagaaacaggaggaaggaga

SEQ ID NO: 22883 - DNA, 20 bp, Artificial Sequence
  ALK Forward Primer
tgggcattccattgattttt

SEQ ID NO: 22884 - DNA, 20 bp, Artificial Sequence
  ALK Forward Primer
gcaagatggctaggctgagt

SEQ ID NO: 22885 - DNA, 20 bp, Artificial Sequence
  ALK Forward Primer
ccctaagcccctggataaaa

SEQ ID NO: 22886 - DNA, 21 bp, Artificial Sequence
  ALK Forward Primer
gcctatcagctcaagatggtg

SEQ ID NO: 22887 - DNA, 20 bp, Artificial Sequence
  ALK Forward Primer
gggctttgttatcatgggtg

SEQ ID NO: 22888 - DNA, 21 bp, Artificial Sequence
  ALK Forward Primer
ggttgtttccagtttcttgct

SEQ ID NO: 22889 - DNA, 23 bp, Artificial Sequence
  ALK Forward Primer
ttctctggaagaataggtgagga

SEQ ID NO: 22890 - DNA, 20 bp, Artificial Sequence
  ALK Forward Primer
tggtggtttttctccaggac

SEQ ID NO: 22891 - DNA, 20 bp, Artificial Sequence
  ALK Forward Primer
gcctagcgcatagaaaaagc

SEQ ID NO: 22892 - DNA, 20 bp, Artificial Sequence
  ALK Forward Primer
ccatgtgtcctttgccattt

SEQ ID NO: 22893 - DNA, 20 bp, Artificial Sequence
  ALK Forward Primer
tagcaaggctgggagaagaa

SEQ ID NO: 22894 - DNA, 20 bp, Artificial Sequence
  ALK Forward Primer
ctccaattccccatagtccc

SEQ ID NO: 22895 - DNA, 20 bp, Artificial Sequence
  ALK Forward Primer
ccttcccttggtttggattt

SEQ ID NO: 22896 - DNA, 20 bp, Artificial Sequence
  ALK Forward Primer
ctaaaatgccaggctcaagg

SEQ ID NO: 22897 - DNA, 20 bp, Artificial Sequence
  ALK Forward Primer
actgtgtggcattcagcaag

SEQ ID NO: 22898 - DNA, 21 bp, Artificial Sequence
  ALK Forward Primer
aagaagccttagggttttgct

SEQ ID NO: 22899 - DNA, 23 bp, Artificial Sequence
  ALK Forward Primer
tttccaaattttgatttttctcc

SEQ ID NO: 22900 - DNA, 20 bp, Artificial Sequence
  ALK Forward Primer
aagcagcctggagcagataa

SEQ ID NO: 22901 - DNA, 20 bp, Artificial Sequence
  ALK Forward Primer
tgccacactgggcataaata

SEQ ID NO: 22902 - DNA, 20 bp, Artificial Sequence
  ALK Forward Primer
tgtgggttagggtggacatt

SEQ ID NO: 22903 - DNA, 21 bp, Artificial Sequence
  ALK Forward Primer
gctgatctttccttcatttgc

SEQ ID NO: 22904 - DNA, 20 bp, Artificial Sequence
  ALK Forward Primer
tagcctggcccaacattatc

SEQ ID NO: 22905 - DNA, 20 bp, Artificial Sequence
  ALK Forward Primer
cttcctcaagcagagttggc

SEQ ID NO: 22906 - DNA, 21 bp, Artificial Sequence
  ALK Forward Primer
cctgaattgaactgaaaggga

SEQ ID NO: 22907 - DNA, 20 bp, Artificial Sequence
  ALK Forward Primer
ctggaagtgctggatggact

SEQ ID NO: 22908 - DNA, 19 bp, Artificial Sequence
  ALK Forward Primer
agaggcgtatgggctgaat

SEQ ID NO: 22909 - DNA, 20 bp, Artificial Sequence
  ALK Forward Primer
gagtgcttgcatcatccaga

SEQ ID NO: 22910 - DNA, 20 bp, Artificial Sequence
  ALK Forward Primer
tcaaagccagtgatctgtgc

SEQ ID NO: 22911 - DNA, 20 bp, Artificial Sequence
  ALK Forward Primer
aactattctggggtggggtc

SEQ ID NO: 22912 - DNA, 20 bp, Artificial Sequence
  ALK Forward Primer
tgccatctggacaaagactg

SEQ ID NO: 22913 - DNA, 20 bp, Artificial Sequence
  ALK Forward Primer
ggccagtacagcaggacaat

SEQ ID NO: 22914 - DNA, 20 bp, Artificial Sequence
  ALK Forward Primer
gtcaagtgctccagtgacca

SEQ ID NO: 22915 - DNA, 22 bp, Artificial Sequence
  ALK Forward Primer
ggctttactcacaaaaacatgg

SEQ ID NO: 22916 - DNA, 20 bp, Artificial Sequence
  ALK Forward Primer
aatttgttgcagcagggttt

SEQ ID NO: 22917 - DNA, 20 bp, Artificial Sequence
  ALK Forward Primer
aatacttggcaccccatgaa

SEQ ID NO: 22918 - DNA, 20 bp, Artificial Sequence
  ALK Forward Primer
cgccacccttgtaagagaag

SEQ ID NO: 22919 - DNA, 20 bp, Artificial Sequence
  ALK Forward Primer
ttatgcgtgaggaattgcag

SEQ ID NO: 22920 - DNA, 20 bp, Artificial Sequence
  ALK Forward Primer
cccttaggggtaacagcaca

SEQ ID NO: 22921 - DNA, 20 bp, Artificial Sequence
  ALK Forward Primer
gccaatttttgcaaatgaca

SEQ ID NO: 22922 - DNA, 20 bp, Artificial Sequence
  ALK Forward Primer
accaggtatcaagcaggtgg

SEQ ID NO: 22923 - DNA, 20 bp, Artificial Sequence
  ALK Forward Primer
gcagccatctaatagcaccc

SEQ ID NO: 22924 - DNA, 20 bp, Artificial Sequence
  ALK Forward Primer
atgtgaagtttggagccagg

SEQ ID NO: 22925 - DNA, 20 bp, Artificial Sequence
  ALK Forward Primer
tgcaccccaaaacaagaaat

SEQ ID NO: 22926 - DNA, 20 bp, Artificial Sequence
  ALK Forward Primer
gcctcagcaattaaaaccca

SEQ ID NO: 22927 - DNA, 24 bp, Artificial Sequence
  ALK Forward Primer
tgaaagaataagcatcaaaacatt

SEQ ID NO: 22928 - DNA, 20 bp, Artificial Sequence
  ALK Forward Primer
aaccaaaggcaacacagacc

SEQ ID NO: 22929 - DNA, 20 bp, Artificial Sequence
  ALK Forward Primer
tccatattctccacatcccc

SEQ ID NO: 22930 - DNA, 19 bp, Artificial Sequence
  ALK Forward Primer
gaaaccattcccaaggtgc

SEQ ID NO: 22931 - DNA, 20 bp, Artificial Sequence
  ALK Forward Primer
ctaggcttggggatgtgtgt

SEQ ID NO: 22932 - DNA, 20 bp, Artificial Sequence
  ALK Forward Primer
cggagcactgaactgaaaaa

SEQ ID NO: 22933 - DNA, 20 bp, Artificial Sequence
  ALK Forward Primer
caaggggcagtgaaaaccta

SEQ ID NO: 22934 - DNA, 20 bp, Artificial Sequence
  ALK Forward Primer
aagagaaagcatgggtgtgg

SEQ ID NO: 22935 - DNA, 20 bp, Artificial Sequence
  ALK Forward Primer
gaaggccagagactgagcac

SEQ ID NO: 22936 - DNA, 20 bp, Artificial Sequence
  ALK Forward Primer
gtgagcccttccagtgacat

SEQ ID NO: 22937 - DNA, 20 bp, Artificial Sequence
  ALK Forward Primer
tagggtttcttggccatcac

SEQ ID NO: 22938 - DNA, 18 bp, Artificial Sequence
  ALK Forward Primer
gtcccccttccctcctct

SEQ ID NO: 22939 - DNA, 20 bp, Artificial Sequence
  ALK Forward Primer
ccttcattcctaagggaggc

SEQ ID NO: 22940 - DNA, 20 bp, Artificial Sequence
  ALK Forward Primer
ttttagggcctgttttccaa

SEQ ID NO: 22941 - DNA, 20 bp, Artificial Sequence
  ALK Forward Primer
ttatccaaccagggctcatc

SEQ ID NO: 22942 - DNA, 20 bp, Artificial Sequence
  ALK Forward Primer
acacaaagaaagcccaggtg

SEQ ID NO: 22943 - DNA, 20 bp, Artificial Sequence
  ALK Forward Primer
gttgtgggccattcagaaac

SEQ ID NO: 22944 - DNA, 20 bp, Artificial Sequence
  ALK Forward Primer
ggaaaatccatcccctttgt

SEQ ID NO: 22945 - DNA, 20 bp, Artificial Sequence
  ALK Forward Primer
catccacccattccttcagt

SEQ ID NO: 22946 - DNA, 20 bp, Artificial Sequence
  ALK Forward Primer
agactgtggctccctgagaa

SEQ ID NO: 22947 - DNA, 20 bp, Artificial Sequence
  ALK Forward Primer
ggaaaatggaatgtgatggg

SEQ ID NO: 22948 - DNA, 20 bp, Artificial Sequence
  ALK Forward Primer
gccggagcagaacaagtaag

SEQ ID NO: 22949 - DNA, 20 bp, Artificial Sequence
  ALK Forward Primer
cacctgtctgtgctggtgtt

SEQ ID NO: 22950 - DNA, 20 bp, Artificial Sequence
  ALK Forward Primer
agtcccacacacaccctttc

SEQ ID NO: 22951 - DNA, 20 bp, Artificial Sequence
  ALK Forward Primer
gcctcaacgttgtatgctga

SEQ ID NO: 22952 - DNA, 20 bp, Artificial Sequence
  ALK Forward Primer
gcgaatgttttcaccaggtt

SEQ ID NO: 22953 - DNA, 20 bp, Artificial Sequence
  ALK Forward Primer
ggggaaattagtgctggctc

SEQ ID NO: 22954 - DNA, 20 bp, Artificial Sequence
  ALK Forward Primer
cccagcatggtgtttctttt

SEQ ID NO: 22955 - DNA, 20 bp, Artificial Sequence
  ALK Forward Primer
gcctgcagttatcccatttc

SEQ ID NO: 22956 - DNA, 20 bp, Artificial Sequence
  ALK Forward Primer
ctcccagagatcaggagcag

SEQ ID NO: 22957 - DNA, 20 bp, Artificial Sequence
  ALK Forward Primer
cctgcccttcactctctttg

SEQ ID NO: 22958 - DNA, 26 bp, Artificial Sequence
  ALK Forward Primer
tgtgtctaattgccttaaataacaga

SEQ ID NO: 22959 - DNA, 20 bp, Artificial Sequence
  ALK Forward Primer
ctggctcctcaccacatctt

SEQ ID NO: 22960 - DNA, 19 bp, Artificial Sequence
  ALK Forward Primer
ccgaaagggtctttgagga

SEQ ID NO: 22961 - DNA, 20 bp, Artificial Sequence
  ALK Forward Primer
gcaaaaactgcctcaaaagc

SEQ ID NO: 22962 - DNA, 20 bp, Artificial Sequence
  ALK Forward Primer
atgttctggagagcacctgg

SEQ ID NO: 22963 - DNA, 20 bp, Artificial Sequence
  ALK Forward Primer
cgctcttcctttgtatccca

SEQ ID NO: 22964 - DNA, 20 bp, Artificial Sequence
  ALK Forward Primer
tttcctctacgctctgggaa

SEQ ID NO: 22965 - DNA, 20 bp, Artificial Sequence
  ALK Forward Primer
cagcttaaggttctgcaccc

SEQ ID NO: 22966 - DNA, 20 bp, Artificial Sequence
  ALK Forward Primer
agtggcattttctttctgcc

SEQ ID NO: 22967 - DNA, 20 bp, Artificial Sequence
  ALK Forward Primer
ctgtaatgcacaggagccaa

SEQ ID NO: 22968 - DNA, 20 bp, Artificial Sequence
  ALK Forward Primer
gtaggtgcaagggctgtgat

SEQ ID NO: 22969 - DNA, 20 bp, Artificial Sequence
  ALK Forward Primer
caccagctctgctctcctct

SEQ ID NO: 22970 - DNA, 20 bp, Artificial Sequence
  ALK Forward Primer
gcttaaatgtccatcctgcc

SEQ ID NO: 22971 - DNA, 20 bp, Artificial Sequence
  ALK Forward Primer
gtactcagaaaccccaccca

SEQ ID NO: 22972 - DNA, 20 bp, Artificial Sequence
  ALK Forward Primer
tcaagagagcttccccaatg

SEQ ID NO: 22973 - DNA, 21 bp, Artificial Sequence
  ALK Forward Primer
aaacctgggatgttaacaggg

SEQ ID NO: 22974 - DNA, 20 bp, Artificial Sequence
  ALK Forward Primer
tcttggatcttagccctgga

SEQ ID NO: 22975 - DNA, 20 bp, Artificial Sequence
  ALK Forward Primer
attggagcaggcctgtattg

SEQ ID NO: 22976 - DNA, 20 bp, Artificial Sequence
  ALK Forward Primer
aagcaatgccacataaatgc

SEQ ID NO: 22977 - DNA, 20 bp, Artificial Sequence
  ALK Forward Primer
aattgcatggcatggttttt

SEQ ID NO: 22978 - DNA, 21 bp, Artificial Sequence
  ALK Forward Primer
ccagcaattgcaatcattttt

SEQ ID NO: 22979 - DNA, 20 bp, Artificial Sequence
  ALK Forward Primer
attttgggcttctgttgcag

SEQ ID NO: 22980 - DNA, 20 bp, Artificial Sequence
  ALK Forward Primer
ttcaacatccaggaacagga

SEQ ID NO: 22981 - DNA, 20 bp, Artificial Sequence
  ALK Forward Primer
cttccaccaacacctcccta

SEQ ID NO: 22982 - DNA, 20 bp, Artificial Sequence
  ALK Forward Primer
ttcatgactggcataggctg

SEQ ID NO: 22983 - DNA, 20 bp, Artificial Sequence
  ALK Forward Primer
accctcctcttggttcttgg

SEQ ID NO: 22984 - DNA, 20 bp, Artificial Sequence
  ALK Forward Primer
ttgggtactggtgaacaagc

SEQ ID NO: 22985 - DNA, 20 bp, Artificial Sequence
  ALK Forward Primer
ccaaagcttgcaggtgattt

SEQ ID NO: 22986 - DNA, 20 bp, Artificial Sequence
  ALK Forward Primer
gcaaggacaggttcaggaaa

SEQ ID NO: 22987 - DNA, 20 bp, Artificial Sequence
  ALK Forward Primer
ggccttctcgttcatggtta

SEQ ID NO: 22988 - DNA, 20 bp, Artificial Sequence
  ALK Forward Primer
tagcacgcttgtcaaattgc

SEQ ID NO: 22989 - DNA, 21 bp, Artificial Sequence
  ALK Forward Primer
gcataattcttccagaggcac

SEQ ID NO: 22990 - DNA, 20 bp, Artificial Sequence
  ALK Forward Primer
tgcttcagcaagaatcatgg

SEQ ID NO: 22991 - DNA, 20 bp, Artificial Sequence
  ALK Forward Primer
aagacagagggctggacgta

SEQ ID NO: 22992 - DNA, 20 bp, Artificial Sequence
  ALK Forward Primer
aggagtgacagcagggctaa

SEQ ID NO: 22993 - DNA, 20 bp, Artificial Sequence
  ALK Forward Primer
gtcactggagaaccagctcc

SEQ ID NO: 22994 - DNA, 20 bp, Artificial Sequence
  ALK Forward Primer
acctgactcattgccactcc

SEQ ID NO: 22995 - DNA, 20 bp, Artificial Sequence
  ALK Forward Primer
caagggagaccttgtgtggt

SEQ ID NO: 22996 - DNA, 20 bp, Artificial Sequence
  ALK Forward Primer
aggttacgttacgccagtgc

SEQ ID NO: 22997 - DNA, 20 bp, Artificial Sequence
  ALK Forward Primer
cctcttcaccgggatcacta

SEQ ID NO: 22998 - DNA, 23 bp, Artificial Sequence
  ALK Forward Primer
caaagaaaaccaaaacacagtga

SEQ ID NO: 22999 - DNA, 20 bp, Artificial Sequence
  ALK Forward Primer
tgtgtgggggttctcttctc

SEQ ID NO: 23000 - DNA, 20 bp, Artificial Sequence
  ALK Forward Primer
caatcctcctcccagatgtc

SEQ ID NO: 23001 - DNA, 20 bp, Artificial Sequence
  ALK Forward Primer
gggggaacagagaggaagac

SEQ ID NO: 23002 - DNA, 21 bp, Artificial Sequence
  ALK Forward Primer
cgaagataaggtgtcgtgctc

SEQ ID NO: 23003 - DNA, 20 bp, Artificial Sequence
  ALK Forward Primer
ggccagatttttctttccct

SEQ ID NO: 23004 - DNA, 20 bp, Artificial Sequence
  ALK Forward Primer
ggtaggggtgtgtggagaga

SEQ ID NO: 23005 - DNA, 20 bp, Artificial Sequence
  ALK Forward Primer
aactgagaccatgtggggag

SEQ ID NO: 23006 - DNA, 23 bp, Artificial Sequence
  ALK Forward Primer
tacctagatctctaagcatcccc

SEQ ID NO: 23007 - DNA, 20 bp, Artificial Sequence
  ALK Forward Primer
ctggtcagcctcacaaatca

SEQ ID NO: 23008 - DNA, 23 bp, Artificial Sequence
  ALK Forward Primer
ggtgactcatatggattttgcat

SEQ ID NO: 23009 - DNA, 20 bp, Artificial Sequence
  ALK Forward Primer
ttcaccaagggaggagacac

SEQ ID NO: 23010 - DNA, 20 bp, Artificial Sequence
  ALK Forward Primer
gcagccatgggtctagagag

SEQ ID NO: 23011 - DNA, 20 bp, Artificial Sequence
  ALK Forward Primer
aatgggcatgaattgctttt

SEQ ID NO: 23012 - DNA, 22 bp, Artificial Sequence
  ALK Forward Primer
tgtggtatggaaccctgtaaaa

SEQ ID NO: 23013 - DNA, 20 bp, Artificial Sequence
  ALK Forward Primer
cgaggaactaactgccagga

SEQ ID NO: 23014 - DNA, 20 bp, Artificial Sequence
  ALK Forward Primer
cacaccaaacactggcaaag

SEQ ID NO: 23015 - DNA, 20 bp, Artificial Sequence
  ALK Forward Primer
agctcagatccacatcaccc

SEQ ID NO: 23016 - DNA, 21 bp, Artificial Sequence
  ALK Forward Primer
tggggaaacagagctgataga

SEQ ID NO: 23017 - DNA, 20 bp, Artificial Sequence
  ALK Forward Primer
gaagtagctcctggcattgg

SEQ ID NO: 23018 - DNA, 20 bp, Artificial Sequence
  ALK Forward Primer
ttcaaaaggacagtctgggg

SEQ ID NO: 23019 - DNA, 20 bp, Artificial Sequence
  ALK Forward Primer
ctgctgggtcaccaactaca

SEQ ID NO: 23020 - DNA, 20 bp, Artificial Sequence
  ALK Forward Primer
agcaagcccctagacaggtt

SEQ ID NO: 23021 - DNA, 20 bp, Artificial Sequence
  ALK Forward Primer
cctggatactaacggctcca

SEQ ID NO: 23022 - DNA, 20 bp, Artificial Sequence
  ALK Forward Primer
aggatgccccttaccagact

SEQ ID NO: 23023 - DNA, 20 bp, Artificial Sequence
  ALK Forward Primer
ctactgaggcaacggaaagc

SEQ ID NO: 23024 - DNA, 20 bp, Artificial Sequence
  ALK Forward Primer
tagaatcccagcagggtcag

SEQ ID NO: 23025 - DNA, 20 bp, Artificial Sequence
  ALK Forward Primer
ggaaaccacaatgcctgact

SEQ ID NO: 23026 - DNA, 21 bp, Artificial Sequence
  ALK Forward Primer
ggtttaccagttcatccctca

SEQ ID NO: 23027 - DNA, 20 bp, Artificial Sequence
  ALK Forward Primer
ctggcaacaaagacagcaaa

SEQ ID NO: 23028 - DNA, 20 bp, Artificial Sequence
  ALK Forward Primer
gcaccacattgctctttcag

SEQ ID NO: 23029 - DNA, 20 bp, Artificial Sequence
  ALK Forward Primer
tacttggttggagcagaccc

SEQ ID NO: 23030 - DNA, 20 bp, Artificial Sequence
  ALK Forward Primer
tccatgaaaaagccccacta

SEQ ID NO: 23031 - DNA, 20 bp, Artificial Sequence
  ALK Forward Primer
tgaatcatgaggaaaagggc

SEQ ID NO: 23032 - DNA, 20 bp, Artificial Sequence
  ALK Forward Primer
ccctgtcatacttccccaaa

SEQ ID NO: 23033 - DNA, 20 bp, Artificial Sequence
  ALK Forward Primer
cccttaagccagggtaggag

SEQ ID NO: 23034 - DNA, 20 bp, Artificial Sequence
  ALK Forward Primer
tacctccctctcagccactg

SEQ ID NO: 23035 - DNA, 20 bp, Artificial Sequence
  ALK Forward Primer
ccttgccatgctttcttttc

SEQ ID NO: 23036 - DNA, 20 bp, Artificial Sequence
  ALK Forward Primer
catggcttgttagtggcaga

SEQ ID NO: 23037 - DNA, 20 bp, Artificial Sequence
  ALK Forward Primer
aaatagccaccattccctcc

SEQ ID NO: 23038 - DNA, 20 bp, Artificial Sequence
  ALK Forward Primer
gtaggcctgtgaacccagaa

SEQ ID NO: 23039 - DNA, 20 bp, Artificial Sequence
  ALK Forward Primer
ctgcttgtcctttgctctga

SEQ ID NO: 23040 - DNA, 20 bp, Artificial Sequence
  ALK Forward Primer
gcggcagataggagaacttg

SEQ ID NO: 23041 - DNA, 20 bp, Artificial Sequence
  ALK Forward Primer
attgattctcccagatcccc

SEQ ID NO: 23042 - DNA, 19 bp, Artificial Sequence
  ALK Forward Primer
aggtaagtgggcagaaccg

SEQ ID NO: 23043 - DNA, 20 bp, Artificial Sequence
  ALK Forward Primer
caatgcctttgtgcttctga

SEQ ID NO: 23044 - DNA, 20 bp, Artificial Sequence
  ALK Forward Primer
tgctcagctaaggaggaacc

SEQ ID NO: 23045 - DNA, 20 bp, Artificial Sequence
  ALK Forward Primer
aggtgacagaaagaggcagc

SEQ ID NO: 23046 - DNA, 22 bp, Artificial Sequence
  ALK Forward Primer
caaaagcaaaggcacaatatca

SEQ ID NO: 23047 - DNA, 20 bp, Artificial Sequence
  ALK Forward Primer
ccttttgcatttctcttcgg

SEQ ID NO: 23048 - DNA, 20 bp, Artificial Sequence
  ALK Forward Primer
ttctcctgccctgtggtaac

SEQ ID NO: 23049 - DNA, 20 bp, Artificial Sequence
  ALK Forward Primer
gcctcccgaacccttagtat

SEQ ID NO: 23050 - DNA, 20 bp, Artificial Sequence
  ALK Forward Primer
tcactctactttccagcccc

SEQ ID NO: 23051 - DNA, 20 bp, Artificial Sequence
  ALK Forward Primer
ttccctcttctcctccttcc

SEQ ID NO: 23052 - DNA, 19 bp, Artificial Sequence
  ALK Forward Primer
tgtgctgtggttcccttgt

SEQ ID NO: 23053 - DNA, 20 bp, Artificial Sequence
  ALK Forward Primer
tccttcatagcagggattgg

SEQ ID NO: 23054 - DNA, 20 bp, Artificial Sequence
  ALK Forward Primer
gaggccgacatctctacagc

SEQ ID NO: 23055 - DNA, 20 bp, Artificial Sequence
  ALK Forward Primer
ggctcaggttttgaacttgc

SEQ ID NO: 23056 - DNA, 21 bp, Artificial Sequence
  ALK Forward Primer
tgtctgtgttgaccattctgg

SEQ ID NO: 23057 - DNA, 20 bp, Artificial Sequence
  ALK Forward Primer
tcctacttcaggggatggtg

SEQ ID NO: 23058 - DNA, 20 bp, Artificial Sequence
  ALK Forward Primer
aaggcagcacacccatagtc

SEQ ID NO: 23059 - DNA, 20 bp, Artificial Sequence
  ALK Forward Primer
tttgtggcaaaaatggttga

SEQ ID NO: 23060 - DNA, 19 bp, Artificial Sequence
  ALK Forward Primer
agtggagagccctggactg

SEQ ID NO: 23061 - DNA, 20 bp, Artificial Sequence
  ALK Forward Primer
tcccttctccccttttctgt

SEQ ID NO: 23062 - DNA, 20 bp, Artificial Sequence
  ALK Forward Primer
ccttctgacaatgggaagga

SEQ ID NO: 23063 - DNA, 20 bp, Artificial Sequence
  ALK Forward Primer
gctgcatggcactacgtaaa

SEQ ID NO: 23064 - DNA, 22 bp, Artificial Sequence
  ALK Forward Primer
tctttacaaatcccctgtgaag

SEQ ID NO: 23065 - DNA, 20 bp, Artificial Sequence
  ALK Forward Primer
aaaggagggggagagattca

SEQ ID NO: 23066 - DNA, 20 bp, Artificial Sequence
  ALK Forward Primer
ttcactgaagccctcatcct

SEQ ID NO: 23067 - DNA, 20 bp, Artificial Sequence
  ALK Forward Primer
gacctcttaaccaatcgcca

SEQ ID NO: 23068 - DNA, 20 bp, Artificial Sequence
  ALK Forward Primer
acaaccctccatcccttttc

SEQ ID NO: 23069 - DNA, 20 bp, Artificial Sequence
  ALK Forward Primer
atcaactttgaccctggcac

SEQ ID NO: 23070 - DNA, 20 bp, Artificial Sequence
  ALK Forward Primer
gatgggggtagaagcacaga

SEQ ID NO: 23071 - DNA, 22 bp, Artificial Sequence
  ALK Forward Primer
tgcatacacagacacatgaagc

SEQ ID NO: 23072 - DNA, 20 bp, Artificial Sequence
  ALK Forward Primer
ggccagtgttgcacctattt

SEQ ID NO: 23073 - DNA, 20 bp, Artificial Sequence
  ALK Forward Primer
gcctcagctctggaaaccta

SEQ ID NO: 23074 - DNA, 21 bp, Artificial Sequence
  ALK Forward Primer
tttcatcctcaccaacaatcc

SEQ ID NO: 23075 - DNA, 20 bp, Artificial Sequence
  ALK Forward Primer
ttgcaaagttcttcttcccc

SEQ ID NO: 23076 - DNA, 20 bp, Artificial Sequence
  ALK Forward Primer
ccagctgttaatcccatgct

SEQ ID NO: 23077 - DNA, 20 bp, Artificial Sequence
  ALK Forward Primer
ggtaatcatgcccatcatcc

SEQ ID NO: 23078 - DNA, 20 bp, Artificial Sequence
  ALK Forward Primer
gcccatttccactccctaat

SEQ ID NO: 23079 - DNA, 21 bp, Artificial Sequence
  ALK Forward Primer
gggctttaagtagatgcctgc

SEQ ID NO: 23080 - DNA, 23 bp, Artificial Sequence
  ALK Forward Primer
cagttgagaaatcaaacaggctt

SEQ ID NO: 23081 - DNA, 20 bp, Artificial Sequence
  ALK Forward Primer
gccttacatcctcccacaaa

SEQ ID NO: 23082 - DNA, 20 bp, Artificial Sequence
  ALK Forward Primer
tctggcagagatgagattgc

SEQ ID NO: 23083 - DNA, 20 bp, Artificial Sequence
  ALK Forward Primer
gagaagatgcagggaaccaa

SEQ ID NO: 23084 - DNA, 20 bp, Artificial Sequence
  ALK Forward Primer
aatcccacactcaaacccaa

SEQ ID NO: 23085 - DNA, 20 bp, Artificial Sequence
  ALK Forward Primer
ggcccacaacaggagtttta

SEQ ID NO: 23086 - DNA, 20 bp, Artificial Sequence
  ALK Forward Primer
ggttggcctgacttcacatt

SEQ ID NO: 23087 - DNA, 20 bp, Artificial Sequence
  ALK Forward Primer
caattagagtctgggcggaa

SEQ ID NO: 23088 - DNA, 21 bp, Artificial Sequence
  ALK Forward Primer
gcctagggacttttgacatcc

SEQ ID NO: 23089 - DNA, 20 bp, Artificial Sequence
  ALK Forward Primer
agcacatggtgcttagggtt

SEQ ID NO: 23090 - DNA, 21 bp, Artificial Sequence
  ALK Forward Primer
tgcattattgaacaagcgatg

SEQ ID NO: 23091 - DNA, 20 bp, Artificial Sequence
  ALK Forward Primer
gagcatggaaatgggcttta

SEQ ID NO: 23092 - DNA, 22 bp, Artificial Sequence
  ALK Forward Primer
tcacagttaacctggcttgaga

SEQ ID NO: 23093 - DNA, 20 bp, Artificial Sequence
  ALK Forward Primer
tggaggcagaatagggattg

SEQ ID NO: 23094 - DNA, 21 bp, Artificial Sequence
  ALK Forward Primer
caagctggtaattaaacccga

SEQ ID NO: 23095 - DNA, 20 bp, Artificial Sequence
  ALK Forward Primer
agcacctgctaactgcatga

SEQ ID NO: 23096 - DNA, 20 bp, Artificial Sequence
  ALK Forward Primer
accaaggatgtggctgaatc

SEQ ID NO: 23097 - DNA, 20 bp, Artificial Sequence
  ALK Forward Primer
atggcatcccgtgttcagta

SEQ ID NO: 23098 - DNA, 20 bp, Artificial Sequence
  ALK Forward Primer
ttcaggacaggttacagggc

SEQ ID NO: 23099 - DNA, 20 bp, Artificial Sequence
  ALK Forward Primer
atctccttgccacattccac

SEQ ID NO: 23100 - DNA, 20 bp, Artificial Sequence
  ALK Forward Primer
ggaagcaaaggtcttcctga

SEQ ID NO: 23101 - DNA, 21 bp, Artificial Sequence
  ALK Forward Primer
aacatatggtggaggggtagg

SEQ ID NO: 23102 - DNA, 21 bp, Artificial Sequence
  ALK Forward Primer
agaacaatgtgaagatggcct

SEQ ID NO: 23103 - DNA, 20 bp, Artificial Sequence
  ALK Forward Primer
atgtcgggacattccagaag

SEQ ID NO: 23104 - DNA, 20 bp, Artificial Sequence
  ALK Forward Primer
caagagtggagtcagggagg

SEQ ID NO: 23105 - DNA, 20 bp, Artificial Sequence
  ALK Forward Primer
attccttaccaccaccacca

SEQ ID NO: 23106 - DNA, 20 bp, Artificial Sequence
  ALK Forward Primer
gtggtttccaaacccaggta

SEQ ID NO: 23107 - DNA, 21 bp, Artificial Sequence
  ALK Forward Primer
caccccagaactgctgaagta

SEQ ID NO: 23108 - DNA, 20 bp, Artificial Sequence
  ALK Forward Primer
gcaaggacagaatgcctctc

SEQ ID NO: 23109 - DNA, 21 bp, Artificial Sequence
  ALK Forward Primer
tgagctgtgttctgcagtttc

SEQ ID NO: 23110 - DNA, 20 bp, Artificial Sequence
  ALK Forward Primer
caacctgcctctttcctctg

SEQ ID NO: 23111 - DNA, 20 bp, Artificial Sequence
  ALK Forward Primer
catcaccaggaaagggaatg

SEQ ID NO: 23112 - DNA, 20 bp, Artificial Sequence
  ALK Forward Primer
ccaagcctgagtctttggag

SEQ ID NO: 23113 - DNA, 21 bp, Artificial Sequence
  ALK Forward Primer
agagctgcttctagctttccc

SEQ ID NO: 23114 - DNA, 20 bp, Artificial Sequence
  ALK Forward Primer
tgtctccgacacagatggaa

SEQ ID NO: 23115 - DNA, 20 bp, Artificial Sequence
  ALK Forward Primer
gcacccaatgtcaattctcc

SEQ ID NO: 23116 - DNA, 20 bp, Artificial Sequence
  ALK Forward Primer
aaaggctcagttttgggaaa

SEQ ID NO: 23117 - DNA, 20 bp, Artificial Sequence
  ALK Forward Primer
gccctagagaagttgcatgg

SEQ ID NO: 23118 - DNA, 20 bp, Artificial Sequence
  ALK Forward Primer
ggctctcttggttttcctcc

SEQ ID NO: 23119 - DNA, 20 bp, Artificial Sequence
  ALK Forward Primer
atctccacttggccattgtt

SEQ ID NO: 23120 - DNA, 20 bp, Artificial Sequence
  ALK Forward Primer
ccctccaaaaccttccattt

SEQ ID NO: 23121 - DNA, 20 bp, Artificial Sequence
  ALK Forward Primer
cctgaccaccctttcaaaaa

SEQ ID NO: 23122 - DNA, 20 bp, Artificial Sequence
  ALK Forward Primer
gcaatgaacttctgccatca

SEQ ID NO: 23123 - DNA, 20 bp, Artificial Sequence
  ALK Forward Primer
ggcctgcaatctttcatgtt

SEQ ID NO: 23124 - DNA, 20 bp, Artificial Sequence
  ALK Forward Primer
ccacagtcacatgcctctct

SEQ ID NO: 23125 - DNA, 20 bp, Artificial Sequence
  ALK Forward Primer
gttctctgcacgctgttttg

SEQ ID NO: 23126 - DNA, 20 bp, Artificial Sequence
  ALK Forward Primer
tattcctgctccccgtattg

SEQ ID NO: 23127 - DNA, 20 bp, Artificial Sequence
  ALK Forward Primer
acagatttttctctggggca

SEQ ID NO: 23128 - DNA, 20 bp, Artificial Sequence
  ALK Forward Primer
gttgactcacctctgccctc

SEQ ID NO: 23129 - DNA, 22 bp, Artificial Sequence
  ALK Forward Primer
gggtaactctctttaaggtggc

SEQ ID NO: 23130 - DNA, 20 bp, Artificial Sequence
  ALK Forward Primer
atacccgatgaggtctccgt

SEQ ID NO: 23131 - DNA, 20 bp, Artificial Sequence
  ALK Forward Primer
gtttgcagaaatctcagccc

SEQ ID NO: 23132 - DNA, 20 bp, Artificial Sequence
  ALK Forward Primer
agggtcatgtccaaggtcaa

SEQ ID NO: 23133 - DNA, 20 bp, Artificial Sequence
  ALK Forward Primer
tccagcagcaacttcttttg

SEQ ID NO: 23134 - DNA, 20 bp, Artificial Sequence
  ALK Forward Primer
gcacctagagatgtcagcca

SEQ ID NO: 23135 - DNA, 20 bp, Artificial Sequence
  ALK Forward Primer
acttcctgcttgcttggtgt

SEQ ID NO: 23136 - DNA, 20 bp, Artificial Sequence
  ALK Forward Primer
tgacctagggttggatcgtc

SEQ ID NO: 23137 - DNA, 20 bp, Artificial Sequence
  ALK Forward Primer
ccctgtgagataggatggga

SEQ ID NO: 23138 - DNA, 22 bp, Artificial Sequence
  ALK Forward Primer
tgacctccttttgttctaggga

SEQ ID NO: 23139 - DNA, 20 bp, Artificial Sequence
  ALK Forward Primer
ttgggtaatcaatcatgcca

SEQ ID NO: 23140 - DNA, 20 bp, Artificial Sequence
  ALK Forward Primer
ctgagctgctgaagaccaga

SEQ ID NO: 23141 - DNA, 21 bp, Artificial Sequence
  ALK Forward Primer
gggaagatgtcaagatgtcca

SEQ ID NO: 23142 - DNA, 20 bp, Artificial Sequence
  ALK Forward Primer
caaacatggattgcctttga

SEQ ID NO: 23143 - DNA, 20 bp, Artificial Sequence
  ALK Forward Primer
ctgtctgagggtcacaagca

SEQ ID NO: 23144 - DNA, 20 bp, Artificial Sequence
  ALK Forward Primer
gctttcatggccttattgga

SEQ ID NO: 23145 - DNA, 20 bp, Artificial Sequence
  ALK Forward Primer
tgagcaaggagggatcaaac

SEQ ID NO: 23146 - DNA, 20 bp, Artificial Sequence
  ALK Forward Primer
aaaacggcatcagttcaggt

SEQ ID NO: 23147 - DNA, 20 bp, Artificial Sequence
  ALK Forward Primer
caaaggtgcctgggtaaaga

SEQ ID NO: 23148 - DNA, 20 bp, Artificial Sequence
  ALK Forward Primer
gtcacggtggctaaagagga

SEQ ID NO: 23149 - DNA, 20 bp, Artificial Sequence
  ALK Forward Primer
tgtccactgtccactcaagc

SEQ ID NO: 23150 - DNA, 20 bp, Artificial Sequence
  ALK Forward Primer
tattcagggatgggagagca

SEQ ID NO: 23151 - DNA, 21 bp, Artificial Sequence
  ALK Forward Primer
cactgaagcagggaccataag

SEQ ID NO: 23152 - DNA, 20 bp, Artificial Sequence
  ALK Forward Primer
tcctgcctctcccagaacta

SEQ ID NO: 23153 - DNA, 20 bp, Artificial Sequence
  ALK Forward Primer
gagatggcatagggtctcca

SEQ ID NO: 23154 - DNA, 20 bp, Artificial Sequence
  ALK Forward Primer
ccctgcctccttctcttctt

SEQ ID NO: 23155 - DNA, 20 bp, Artificial Sequence
  ALK Forward Primer
gtccaccacagtccctctgt

SEQ ID NO: 23156 - DNA, 20 bp, Artificial Sequence
  ALK Forward Primer
agtcagggtgaaaaggggat

SEQ ID NO: 23157 - DNA, 20 bp, Artificial Sequence
  ALK Forward Primer
tgtgattaaacgaccctccc

SEQ ID NO: 23158 - DNA, 20 bp, Artificial Sequence
  ALK Forward Primer
tgcagctacaggaagcagag

SEQ ID NO: 23159 - DNA, 20 bp, Artificial Sequence
  ALK Forward Primer
atttgcatggcacacttgag

SEQ ID NO: 23160 - DNA, 20 bp, Artificial Sequence
  ALK Forward Primer
cctccaattctgcaccttgt

SEQ ID NO: 23161 - DNA, 20 bp, Artificial Sequence
  ALK Forward Primer
ggctccttatggttatgcca

SEQ ID NO: 23162 - DNA, 22 bp, Artificial Sequence
  ALK Forward Primer
ggactcaagagctgtttgatga

SEQ ID NO: 23163 - DNA, 20 bp, Artificial Sequence
  ALK Forward Primer
ttcatcttcctgagcaacca

SEQ ID NO: 23164 - DNA, 20 bp, Artificial Sequence
  ALK Forward Primer
ccttctctctctcccggatt

SEQ ID NO: 23165 - DNA, 21 bp, Artificial Sequence
  ALK Forward Primer
tccatgtaacaatgcaggaaa

SEQ ID NO: 23166 - DNA, 20 bp, Artificial Sequence
  ALK Forward Primer
cttggtttctgggttcctca

SEQ ID NO: 23167 - DNA, 21 bp, Artificial Sequence
  ALK Forward Primer
cacagcctttttgtactccca

SEQ ID NO: 23168 - DNA, 20 bp, Artificial Sequence
  ALK Forward Primer
caccttgtcccaggtcctac

SEQ ID NO: 23169 - DNA, 20 bp, Artificial Sequence
  ALK Forward Primer
ccgcttttccctatctgatg

SEQ ID NO: 23170 - DNA, 20 bp, Artificial Sequence
  ALK Forward Primer
attgtttgcttcaacagggc

SEQ ID NO: 23171 - DNA, 20 bp, Artificial Sequence
  ALK Forward Primer
catgggtgtttctcattccc

SEQ ID NO: 23172 - DNA, 20 bp, Artificial Sequence
  ALK Forward Primer
tttttctccccactgctttg

SEQ ID NO: 23173 - DNA, 20 bp, Artificial Sequence
  ALK Forward Primer
tttggccagttcactgttga

SEQ ID NO: 23174 - DNA, 19 bp, Artificial Sequence
  ALK Forward Primer
ggggaacatctttccctca

SEQ ID NO: 23175 - DNA, 23 bp, Artificial Sequence
  ALK Forward Primer
ttccttagtgattggcaaatgtt

SEQ ID NO: 23176 - DNA, 20 bp, Artificial Sequence
  ALK Forward Primer
gttctttccctatcccagcc

SEQ ID NO: 23177 - DNA, 20 bp, Artificial Sequence
  ALK Forward Primer
gtcagccaatcttgctggtt

SEQ ID NO: 23178 - DNA, 20 bp, Artificial Sequence
  ALK Forward Primer
ctgcactgagttctcccaca

SEQ ID NO: 23179 - DNA, 20 bp, Artificial Sequence
  ALK Forward Primer
agcttgctgcacttccattt

SEQ ID NO: 23180 - DNA, 21 bp, Artificial Sequence
  ALK Forward Primer
ctccactatgccattttcctg

SEQ ID NO: 23181 - DNA, 20 bp, Artificial Sequence
  ALK Forward Primer
gtcccggctttctttcaaat

SEQ ID NO: 23182 - DNA, 20 bp, Artificial Sequence
  ALK Forward Primer
acagggctccttccatttct

SEQ ID NO: 23183 - DNA, 19 bp, Artificial Sequence
  ALK Forward Primer
aagcggacaccccagtatc

SEQ ID NO: 23184 - DNA, 20 bp, Artificial Sequence
  ALK Forward Primer
tgtgactgtggctggagaag

SEQ ID NO: 23185 - DNA, 20 bp, Artificial Sequence
  ALK Forward Primer
acaagagccaaactcccaga

SEQ ID NO: 23186 - DNA, 20 bp, Artificial Sequence
  ALK Forward Primer
gccaggagttcctctttcct

SEQ ID NO: 23187 - DNA, 20 bp, Artificial Sequence
  ALK Forward Primer
taaggcaacccttctcagga

SEQ ID NO: 23188 - DNA, 20 bp, Artificial Sequence
  ALK Forward Primer
gattggcccctgggtatatt

SEQ ID NO: 23189 - DNA, 20 bp, Artificial Sequence
  ALK Forward Primer
gcaaaagcaacagaaggaaa

SEQ ID NO: 23190 - DNA, 22 bp, Artificial Sequence
  ALK Forward Primer
gccagtaggaaatattggttgc

SEQ ID NO: 23191 - DNA, 20 bp, Artificial Sequence
  ALK Forward Primer
gggccagggtaagatgactt

SEQ ID NO: 23192 - DNA, 20 bp, Artificial Sequence
  ALK Forward Primer
ttctgcccatgagtgtgtgt

SEQ ID NO: 23193 - DNA, 20 bp, Artificial Sequence
  ALK Forward Primer
gcctgcactagcacatttca

SEQ ID NO: 23194 - DNA, 20 bp, Artificial Sequence
  ALK Forward Primer
gatgaaggaggaaatgctgg

SEQ ID NO: 23195 - DNA, 20 bp, Artificial Sequence
  ALK Forward Primer
ttgagaggtgttcagggacc

SEQ ID NO: 23196 - DNA, 20 bp, Artificial Sequence
  ALK Forward Primer
gctccaggatggtgtttcac

SEQ ID NO: 23197 - DNA, 20 bp, Artificial Sequence
  ALK Forward Primer
cacagaatgcctccatctga

SEQ ID NO: 23198 - DNA, 26 bp, Artificial Sequence
  ALK Forward Primer
gcatctaaatactatctgacccatga

SEQ ID NO: 23199 - DNA, 20 bp, Artificial Sequence
  ALK Forward Primer
ggaacaacgctacttcaggg

SEQ ID NO: 23200 - DNA, 21 bp, Artificial Sequence
  ALK Forward Primer
tgacagtggtgagcctctctt

SEQ ID NO: 23201 - DNA, 20 bp, Artificial Sequence
  ALK Forward Primer
agtgtgtgcactgacccttg

SEQ ID NO: 23202 - DNA, 21 bp, Artificial Sequence
  ALK Forward Primer
ccacttgtccctgtctcttga

SEQ ID NO: 23203 - DNA, 27 bp, Artificial Sequence
  ALK Forward Primer
aaaacagatttctatgaaaattgaagc

SEQ ID NO: 23204 - DNA, 22 bp, Artificial Sequence
  ALK Forward Primer
gggatccctgttctagagaaat

SEQ ID NO: 23205 - DNA, 20 bp, Artificial Sequence
  ALK Forward Primer
gggtgaaaacatgcaaacct

SEQ ID NO: 23206 - DNA, 23 bp, Artificial Sequence
  ALK Forward Primer
ttgttggttttgctgtaatctct

SEQ ID NO: 23207 - DNA, 20 bp, Artificial Sequence
  ALK Forward Primer
ctccctcatcagcttaccca

SEQ ID NO: 23208 - DNA, 20 bp, Artificial Sequence
  ALK Forward Primer
ttcttccaaaaagccaggaa

SEQ ID NO: 23209 - DNA, 20 bp, Artificial Sequence
  ALK Forward Primer
gacttgtcttcctcccctcc

SEQ ID NO: 23210 - DNA, 20 bp, Artificial Sequence
  ALK Forward Primer
ccacagggctctgtattggt

SEQ ID NO: 23211 - DNA, 21 bp, Artificial Sequence
  ALK Forward Primer
ctctgaaaaatgctagccagg

SEQ ID NO: 23212 - DNA, 20 bp, Artificial Sequence
  ALK Forward Primer
atgccctgggatgttttgta

SEQ ID NO: 23213 - DNA, 20 bp, Artificial Sequence
  ALK Forward Primer
acttcatcctctccccgaag

SEQ ID NO: 23214 - DNA, 20 bp, Artificial Sequence
  ALK Forward Primer
tttcagaatacagtgggggc

SEQ ID NO: 23215 - DNA, 22 bp, Artificial Sequence
  ALK Forward Primer
tgagttgataagccacttgctc

SEQ ID NO: 23216 - DNA, 20 bp, Artificial Sequence
  ALK Forward Primer
tccacattggtggatgttca

SEQ ID NO: 23217 - DNA, 20 bp, Artificial Sequence
  ALK Forward Primer
ttcttagtccgcagcaacct

SEQ ID NO: 23218 - DNA, 20 bp, Artificial Sequence
  ALK Forward Primer
caggggtgggaaactacctt

SEQ ID NO: 23219 - DNA, 23 bp, Artificial Sequence
  ALK Forward Primer
ggataatgcagaatatccagtgt

SEQ ID NO: 23220 - DNA, 20 bp, Artificial Sequence
  ALK Forward Primer
tgaccttcaggaggatccag

SEQ ID NO: 23221 - DNA, 20 bp, Artificial Sequence
  ALK Forward Primer
ctgcacagagcagctgagac

SEQ ID NO: 23222 - DNA, 20 bp, Artificial Sequence
  ALK Forward Primer
cctgcatgtgtgtgtgtgtg

SEQ ID NO: 23223 - DNA, 20 bp, Artificial Sequence
  ALK Forward Primer
ctctgaacctgagggtggaa

SEQ ID NO: 23224 - DNA, 20 bp, Artificial Sequence
  ALK Forward Primer
ttggacacttgggtctcctc

SEQ ID NO: 23225 - DNA, 20 bp, Artificial Sequence
  ALK Forward Primer
cgtgagctttggaagcaaat

SEQ ID NO: 23226 - DNA, 20 bp, Artificial Sequence
  ALK Forward Primer
acactcgccaaggactcact

SEQ ID NO: 23227 - DNA, 22 bp, Artificial Sequence
  ALK Forward Primer
gccatatcactgatgtcttcca

SEQ ID NO: 23228 - DNA, 20 bp, Artificial Sequence
  ALK Forward Primer
ctgggatacagagcctgacg

SEQ ID NO: 23229 - DNA, 20 bp, Artificial Sequence
  ALK Forward Primer
tgacatttgcagtcagaggc

SEQ ID NO: 23230 - DNA, 20 bp, Artificial Sequence
  ALK Forward Primer
tgcatcctcaggcttcactt

SEQ ID NO: 23231 - DNA, 20 bp, Artificial Sequence
  ALK Forward Primer
tgtacccagctcaagggaac

SEQ ID NO: 23232 - DNA, 20 bp, Artificial Sequence
  ALK Forward Primer
ctcccaatgatcagatggct

SEQ ID NO: 23233 - DNA, 20 bp, Artificial Sequence
  ALK Forward Primer
actcttaccaccttggccct

SEQ ID NO: 23234 - DNA, 20 bp, Artificial Sequence
  ALK Forward Primer
ggaattgtgaggagggtgaa

SEQ ID NO: 23235 - DNA, 20 bp, Artificial Sequence
  ALK Forward Primer
agaataattgcccctttggg

SEQ ID NO: 23236 - DNA, 20 bp, Artificial Sequence
  ALK Forward Primer
aaccattcacttccttccca

SEQ ID NO: 23237 - DNA, 20 bp, Artificial Sequence
  ALK Forward Primer
gaactctgagcaatgtggca

SEQ ID NO: 23238 - DNA, 20 bp, Artificial Sequence
  ALK Forward Primer
ggaccaaaggtccacagaaa

SEQ ID NO: 23239 - DNA, 20 bp, Artificial Sequence
  ALK Forward Primer
aaaacccaccttttgctgtg

SEQ ID NO: 23240 - DNA, 20 bp, Artificial Sequence
  ALK Forward Primer
ctgagtgtggccatgtgttc

SEQ ID NO: 23241 - DNA, 20 bp, Artificial Sequence
  ALK Forward Primer
caaatgggctggttcaagtc

SEQ ID NO: 23242 - DNA, 21 bp, Artificial Sequence
  ALK Forward Primer
cctcagctcactcatgtctgc

SEQ ID NO: 23243 - DNA, 20 bp, Artificial Sequence
  ALK Forward Primer
gctgaaaggctgtaggttgg

SEQ ID NO: 23244 - DNA, 20 bp, Artificial Sequence
  ALK Forward Primer
tttggggttatagtgcggtc

SEQ ID NO: 23245 - DNA, 20 bp, Artificial Sequence
  ALK Forward Primer
ccatcttcacctggctgtct

SEQ ID NO: 23246 - DNA, 20 bp, Artificial Sequence
  ALK Forward Primer
ctcaccccaggtcctctaca

SEQ ID NO: 23247 - DNA, 20 bp, Artificial Sequence
  ALK Forward Primer
ctccttgagggaagcaaatg

SEQ ID NO: 23248 - DNA, 20 bp, Artificial Sequence
  ALK Forward Primer
taggtggtccctgatccttg

SEQ ID NO: 23249 - DNA, 20 bp, Artificial Sequence
  ALK Forward Primer
gccagaggtcctttgtgttt

SEQ ID NO: 23250 - DNA, 20 bp, Artificial Sequence
  ALK Forward Primer
ctacctacagtgccaagggg

SEQ ID NO: 23251 - DNA, 21 bp, Artificial Sequence
  ALK Forward Primer
tggctcacctactccgtaaaa

SEQ ID NO: 23252 - DNA, 20 bp, Artificial Sequence
  ALK Forward Primer
tggtgctacctgatggaaca

SEQ ID NO: 23253 - DNA, 20 bp, Artificial Sequence
  ALK Forward Primer
acacagcatattaggcccca

SEQ ID NO: 23254 - DNA, 20 bp, Artificial Sequence
  ALK Forward Primer
accaggatgcaggtgaagac

SEQ ID NO: 23255 - DNA, 20 bp, Artificial Sequence
  ALK Forward Primer
ttgttctgcagtgggtcttg

SEQ ID NO: 23256 - DNA, 20 bp, Artificial Sequence
  ALK Forward Primer
agctcctccttccccataaa

SEQ ID NO: 23257 - DNA, 20 bp, Artificial Sequence
  ALK Forward Primer
acatggtttatcagggccaa

SEQ ID NO: 23258 - DNA, 20 bp, Artificial Sequence
  ALK Forward Primer
tctggaatctcctgacgacc

SEQ ID NO: 23259 - DNA, 20 bp, Artificial Sequence
  ALK Forward Primer
atgcatatcttccatgcgat

SEQ ID NO: 23260 - DNA, 21 bp, Artificial Sequence
  ALK Forward Primer
tgggttagaaccagaaagcaa

SEQ ID NO: 23261 - DNA, 20 bp, Artificial Sequence
  ALK Forward Primer
tgcatatagggagctgaggg

SEQ ID NO: 23262 - DNA, 19 bp, Artificial Sequence
  ALK Forward Primer
actgatccatgtgcttggg

SEQ ID NO: 23263 - DNA, 20 bp, Artificial Sequence
  ALK Forward Primer
atgaactagaagccagggca

SEQ ID NO: 23264 - DNA, 20 bp, Artificial Sequence
  ALK Forward Primer
ggaagctaggtgaccggagt

SEQ ID NO: 23265 - DNA, 20 bp, Artificial Sequence
  ALK Forward Primer
aagactgagtgcagggagga

SEQ ID NO: 23266 - DNA, 20 bp, Artificial Sequence
  ALK Forward Primer
gtgaagaggaaaagggggag

SEQ ID NO: 23267 - DNA, 20 bp, Artificial Sequence
  ALK Forward Primer
tccacggtctccttcctaaa

SEQ ID NO: 23268 - DNA, 20 bp, Artificial Sequence
  ALK Forward Primer
ttcgtagataggcaatgggg

SEQ ID NO: 23269 - DNA, 20 bp, Artificial Sequence
  ALK Forward Primer
ttgactacagccacacagcc

SEQ ID NO: 23270 - DNA, 20 bp, Artificial Sequence
  ALK Forward Primer
gggaagactcggacaatcaa

SEQ ID NO: 23271 - DNA, 20 bp, Artificial Sequence
  ALK Forward Primer
tgaatgggtacagaatggca

SEQ ID NO: 23272 - DNA, 22 bp, Artificial Sequence
  ALK Forward Primer
tgaatattgcagggttgaaaaa

SEQ ID NO: 23273 - DNA, 20 bp, Artificial Sequence
  ALK Forward Primer
aatcggaagcattggaacag

SEQ ID NO: 23274 - DNA, 20 bp, Artificial Sequence
  ALK Forward Primer
aggcctgaagagaaaggagg

SEQ ID NO: 23275 - DNA, 20 bp, Artificial Sequence
  ALK Forward Primer
gagaagaggggtggaggaac

SEQ ID NO: 23276 - DNA, 20 bp, Artificial Sequence
  ALK Forward Primer
tgctgttacaatggtcctgc

SEQ ID NO: 23277 - DNA, 20 bp, Artificial Sequence
  ALK Forward Primer
ttcactggaccactcagcag

SEQ ID NO: 23278 - DNA, 20 bp, Artificial Sequence
  ALK Forward Primer
atttcaagtgagtgcgggac

SEQ ID NO: 23279 - DNA, 20 bp, Artificial Sequence
  ALK Forward Primer
tccttgcccgacatgtaagt

SEQ ID NO: 23280 - DNA, 20 bp, Artificial Sequence
  ALK Forward Primer
accatgagcaagccaaaaac

SEQ ID NO: 23281 - DNA, 20 bp, Artificial Sequence
  ALK Forward Primer
tctcagggttttgtaagggc

SEQ ID NO: 23282 - DNA, 20 bp, Artificial Sequence
  ALK Forward Primer
caactacccaaattgcagcc

SEQ ID NO: 23283 - DNA, 21 bp, Artificial Sequence
  ALK Forward Primer
caaagcaaagcttaatgtggc

SEQ ID NO: 23284 - DNA, 20 bp, Artificial Sequence
  ALK Forward Primer
gagagtttgcagatgcacca

SEQ ID NO: 23285 - DNA, 20 bp, Artificial Sequence
  ALK Forward Primer
ctttctctaagccccatccc

SEQ ID NO: 23286 - DNA, 20 bp, Artificial Sequence
  ALK Forward Primer
aggttgctccagaatggcta

SEQ ID NO: 23287 - DNA, 20 bp, Artificial Sequence
  ALK Forward Primer
ttgaggccattcaacaaaca

SEQ ID NO: 23288 - DNA, 20 bp, Artificial Sequence
  ALK Forward Primer
gcacctcctgactcatccat

SEQ ID NO: 23289 - DNA, 20 bp, Artificial Sequence
  ALK Forward Primer
aggctttgaactgccatcag

SEQ ID NO: 23290 - DNA, 20 bp, Artificial Sequence
  ALK Forward Primer
tgtgacccactttcacagga

SEQ ID NO: 23291 - DNA, 20 bp, Artificial Sequence
  ALK Forward Primer
gcagacctctgatgtgtgga

SEQ ID NO: 23292 - DNA, 20 bp, Artificial Sequence
  ALK Forward Primer
tccttgaaattggtccttgg

SEQ ID NO: 23293 - DNA, 20 bp, Artificial Sequence
  ALK Forward Primer
actcatcatgctttcccagc

SEQ ID NO: 23294 - DNA, 20 bp, Artificial Sequence
  ALK Forward Primer
tcaatgttacccttggcctc

SEQ ID NO: 23295 - DNA, 20 bp, Artificial Sequence
  ALK Forward Primer
tagagcttccaggctgagga

SEQ ID NO: 23296 - DNA, 20 bp, Artificial Sequence
  ALK Forward Primer
agctccttatttgccaccaa

SEQ ID NO: 23297 - DNA, 20 bp, Artificial Sequence
  ALK Forward Primer
tacctaaaatggctctgccc

SEQ ID NO: 23298 - DNA, 20 bp, Artificial Sequence
  ALK Forward Primer
aagagaggcaaagagggagg

SEQ ID NO: 23299 - DNA, 20 bp, Artificial Sequence
  ALK Forward Primer
gagcaccctggaattagctg

SEQ ID NO: 23300 - DNA, 20 bp, Artificial Sequence
  ALK Forward Primer
agagagttcctctgcaccca

SEQ ID NO: 23301 - DNA, 20 bp, Artificial Sequence
  ALK Forward Primer
tctgctctggtaggcacctt

SEQ ID NO: 23302 - DNA, 20 bp, Artificial Sequence
  ALK Forward Primer
actcccaaagccctttcatt

SEQ ID NO: 23303 - DNA, 20 bp, Artificial Sequence
  ALK Forward Primer
tgtgctgacaggctccatag

SEQ ID NO: 23304 - DNA, 20 bp, Artificial Sequence
  ALK Forward Primer
gggtgagtaagggctttgaa

SEQ ID NO: 23305 - DNA, 20 bp, Artificial Sequence
  ALK Forward Primer
agtcccatcaggattagggg

SEQ ID NO: 23306 - DNA, 20 bp, Artificial Sequence
  ALK Forward Primer
gaaactaaaccttccggcct

SEQ ID NO: 23307 - DNA, 20 bp, Artificial Sequence
  ALK Forward Primer
gaggagagtcctccctttgc

SEQ ID NO: 23308 - DNA, 20 bp, Artificial Sequence
  ALK Forward Primer
aactccagaagttccagcca

SEQ ID NO: 23309 - DNA, 21 bp, Artificial Sequence
  ALK Forward Primer
gggagaccccaaagataaaga

SEQ ID NO: 23310 - DNA, 20 bp, Artificial Sequence
  ALK Forward Primer
tgctggtatcacccagaaga

SEQ ID NO: 23311 - DNA, 20 bp, Artificial Sequence
  ALK Forward Primer
aaatgctgggcaaaatatgg

SEQ ID NO: 23312 - DNA, 20 bp, Artificial Sequence
  ALK Forward Primer
gcctgtagatcctggcagac

SEQ ID NO: 23313 - DNA, 20 bp, Artificial Sequence
  ALK Forward Primer
ccaggactcagcctccttct

SEQ ID NO: 23314 - DNA, 20 bp, Artificial Sequence
  ALK Forward Primer
aaagataaagctcggggacc

SEQ ID NO: 23315 - DNA, 26 bp, Artificial Sequence
  ALK Forward Primer
aaaaatctcaattccaacagtaatca

SEQ ID NO: 23316 - DNA, 21 bp, Artificial Sequence
  ALK Forward Primer
ttgctatgcacatggatcatt

SEQ ID NO: 23317 - DNA, 25 bp, Artificial Sequence
  ALK Forward Primer
cttttgactgattctctcctaagaa

SEQ ID NO: 23318 - DNA, 20 bp, Artificial Sequence
  ALK Forward Primer
gcccaggaagtcttactcca

SEQ ID NO: 23319 - DNA, 22 bp, Artificial Sequence
  ALK Forward Primer
tgccaaattacccttattttca

SEQ ID NO: 23320 - DNA, 24 bp, Artificial Sequence
  ALK Forward Primer
aaatgcttattgaatttgtagcga

SEQ ID NO: 23321 - DNA, 21 bp, Artificial Sequence
  ALK Forward Primer
ttgcatatactttgggcatcc

SEQ ID NO: 23322 - DNA, 20 bp, Artificial Sequence
  ALK Forward Primer
ggatgtatgattgccccaag

SEQ ID NO: 23323 - DNA, 20 bp, Artificial Sequence
  ALK Forward Primer
tttgggatggttcctcagaa

SEQ ID NO: 23324 - DNA, 20 bp, Artificial Sequence
  ALK Forward Primer
tttcatgtgcctcaggtcag

SEQ ID NO: 23325 - DNA, 20 bp, Artificial Sequence
  ALK Forward Primer
aaatttgcatgccctttttg

SEQ ID NO: 23326 - DNA, 20 bp, Artificial Sequence
  ALK Forward Primer
agaaggttgcccaggttttt

SEQ ID NO: 23327 - DNA, 20 bp, Artificial Sequence
  ALK Forward Primer
gcatgtgattgaggcaggtt

SEQ ID NO: 23328 - DNA, 22 bp, Artificial Sequence
  ALK Forward Primer
aaactctatcatgtgtgccagg

SEQ ID NO: 23329 - DNA, 21 bp, Artificial Sequence
  ALK Forward Primer
aggtcagaggctgttgtttca

SEQ ID NO: 23330 - DNA, 22 bp, Artificial Sequence
  ALK Forward Primer
cagacatgaggacagtcagagg

SEQ ID NO: 23331 - DNA, 20 bp, Artificial Sequence
  ALK Forward Primer
tgacagcaaccaagctcaac

SEQ ID NO: 23332 - DNA, 20 bp, Artificial Sequence
  ALK Forward Primer
aagaggagctggggagagag

SEQ ID NO: 23333 - DNA, 20 bp, Artificial Sequence
  ALK Forward Primer
aaggcaggcttgctgataaa

SEQ ID NO: 23334 - DNA, 20 bp, Artificial Sequence
  ALK Forward Primer
aggtccttcctggctctgat

SEQ ID NO: 23335 - DNA, 20 bp, Artificial Sequence
  ALK Forward Primer
aagacacctagagcagccca

SEQ ID NO: 23336 - DNA, 21 bp, Artificial Sequence
  ALK Forward Primer
tgttgagtttcatgattcccc

SEQ ID NO: 23337 - DNA, 20 bp, Artificial Sequence
  ALK Forward Primer
cagggaagtctcccatacca

SEQ ID NO: 23338 - DNA, 20 bp, Artificial Sequence
  ALK Forward Primer
ccagaaaccacccaacagat

SEQ ID NO: 23339 - DNA, 20 bp, Artificial Sequence
  ALK Forward Primer
ggctctcagagaacattggg

SEQ ID NO: 23340 - DNA, 20 bp, Artificial Sequence
  ALK Forward Primer
gggggtaccgagagagagag

SEQ ID NO: 23341 - DNA, 20 bp, Artificial Sequence
  ALK Forward Primer
tcctgacaacagcagtcaca

SEQ ID NO: 23342 - DNA, 20 bp, Artificial Sequence
  ALK Forward Primer
gagaagaaagctggggctct

SEQ ID NO: 23343 - DNA, 21 bp, Artificial Sequence
  ALK Forward Primer
ttgccctaagctaacaccact

SEQ ID NO: 23344 - DNA, 20 bp, Artificial Sequence
  ALK Forward Primer
gctggtgacaggtacccaaa

SEQ ID NO: 23345 - DNA, 21 bp, Artificial Sequence
  ALK Forward Primer
cctgacattttctgggattca

SEQ ID NO: 23346 - DNA, 20 bp, Artificial Sequence
  ALK Forward Primer
accaagtccaggtcccttct

SEQ ID NO: 23347 - DNA, 21 bp, Artificial Sequence
  ALK Forward Primer
tcagggctttattcacaacaa

SEQ ID NO: 23348 - DNA, 20 bp, Artificial Sequence
  ALK Forward Primer
atcggttttggagtgacagg

SEQ ID NO: 23349 - DNA, 20 bp, Artificial Sequence
  ALK Forward Primer
tcccttctaaagtggcaagg

SEQ ID NO: 23350 - DNA, 20 bp, Artificial Sequence
  ALK Forward Primer
tgtggatcagctctccagtg

SEQ ID NO: 23351 - DNA, 20 bp, Artificial Sequence
  ALK Forward Primer
aaaggccccttaatcctgaa

SEQ ID NO: 23352 - DNA, 20 bp, Artificial Sequence
  ALK Forward Primer
ggcaacttcagtttagccga

SEQ ID NO: 23353 - DNA, 20 bp, Artificial Sequence
  ALK Forward Primer
tgttcctcttgccttctgct

SEQ ID NO: 23354 - DNA, 20 bp, Artificial Sequence
  ALK Forward Primer
tgcagaatagccctgaaggt

SEQ ID NO: 23355 - DNA, 20 bp, Artificial Sequence
  ALK Forward Primer
tggcagaaacacacagaagg

SEQ ID NO: 23356 - DNA, 20 bp, Artificial Sequence
  ALK Forward Primer
cattcctatcggccagaaaa

SEQ ID NO: 23357 - DNA, 20 bp, Artificial Sequence
  ALK Forward Primer
aattccaggccatgaatctg

SEQ ID NO: 23358 - DNA, 20 bp, Artificial Sequence
  ALK Forward Primer
tagaccatgcacctttgcag

SEQ ID NO: 23359 - DNA, 20 bp, Artificial Sequence
  ALK Forward Primer
tgggaataaggacggttttt

SEQ ID NO: 23360 - DNA, 20 bp, Artificial Sequence
  ALK Forward Primer
agcaccgtgattctgagctt

SEQ ID NO: 23361 - DNA, 20 bp, Artificial Sequence
  ALK Forward Primer
tgactttgccaggaagctct

SEQ ID NO: 23362 - DNA, 20 bp, Artificial Sequence
  ALK Forward Primer
ggaatggattccgctgagta

SEQ ID NO: 23363 - DNA, 20 bp, Artificial Sequence
  ALK Forward Primer
gtcactgccaaacagggagt

SEQ ID NO: 23364 - DNA, 20 bp, Artificial Sequence
  ALK Forward Primer
tacacacagtggcaaggagc

SEQ ID NO: 23365 - DNA, 22 bp, Artificial Sequence
  ALK Forward Primer
caagactcccaggacttttgtt

SEQ ID NO: 23366 - DNA, 20 bp, Artificial Sequence
  ALK Forward Primer
gtgggagagcagaccatgag

SEQ ID NO: 23367 - DNA, 20 bp, Artificial Sequence
  ALK Forward Primer
gtgaaatgtggaaactgggg

SEQ ID NO: 23368 - DNA, 20 bp, Artificial Sequence
  ALK Forward Primer
attgaatacaggcacctggc

SEQ ID NO: 23369 - DNA, 20 bp, Artificial Sequence
  ALK Forward Primer
tagggtcggtgtttcctgtc

SEQ ID NO: 23370 - DNA, 20 bp, Artificial Sequence
  ALK Forward Primer
ggttttctgtctgcctttcc

SEQ ID NO: 23371 - DNA, 20 bp, Artificial Sequence
  ALK Forward Primer
gtgcaggaatctttcccttg

SEQ ID NO: 23372 - DNA, 20 bp, Artificial Sequence
  ALK Forward Primer
tgtccactgctcctaagggt

SEQ ID NO: 23373 - DNA, 20 bp, Artificial Sequence
  ALK Forward Primer
actaactgggcaactccagg

SEQ ID NO: 23374 - DNA, 20 bp, Artificial Sequence
  ALK Forward Primer
cagactccattaagccccaa

SEQ ID NO: 23375 - DNA, 20 bp, Artificial Sequence
  ALK Forward Primer
gctgtcctcaacacacctca

SEQ ID NO: 23376 - DNA, 20 bp, Artificial Sequence
  ALK Forward Primer
gggttgacgtggccttagta

SEQ ID NO: 23377 - DNA, 20 bp, Artificial Sequence
  ALK Forward Primer
cttgacctttggagctttgg

SEQ ID NO: 23378 - DNA, 20 bp, Artificial Sequence
  ALK Forward Primer
tgtctgctgggaactcactg

SEQ ID NO: 23379 - DNA, 20 bp, Artificial Sequence
  ALK Forward Primer
cggaggcaaggagaatacaa

SEQ ID NO: 23380 - DNA, 20 bp, Artificial Sequence
  ALK Forward Primer
ttcaaacgaattgacctcca

SEQ ID NO: 23381 - DNA, 20 bp, Artificial Sequence
  ALK Forward Primer
accagatccatgtctcagca

SEQ ID NO: 23382 - DNA, 20 bp, Artificial Sequence
  ALK Forward Primer
ctggatggagaacttggcat

SEQ ID NO: 23383 - DNA, 20 bp, Artificial Sequence
  ALK Forward Primer
caatagagcccaggccaata

SEQ ID NO: 23384 - DNA, 20 bp, Artificial Sequence
  ALK Forward Primer
tggtcacccagaaccagaat

SEQ ID NO: 23385 - DNA, 23 bp, Artificial Sequence
  ALK Forward Primer
gcccttatttgtagtatttggca

SEQ ID NO: 23386 - DNA, 20 bp, Artificial Sequence
  ALK Forward Primer
gggttgttcagaacccttca

SEQ ID NO: 23387 - DNA, 20 bp, Artificial Sequence
  ALK Forward Primer
gcaggaccataaccctttga

SEQ ID NO: 23388 - DNA, 20 bp, Artificial Sequence
  ALK Forward Primer
tagaagctgtggaacacccc

SEQ ID NO: 23389 - DNA, 20 bp, Artificial Sequence
  ALK Forward Primer
gggctcagcaggataaatga

SEQ ID NO: 23390 - DNA, 20 bp, Artificial Sequence
  ALK Forward Primer
ctcacttcatggagggccta

SEQ ID NO: 23391 - DNA, 20 bp, Artificial Sequence
  ALK Forward Primer
aacagggatgtcaaacaggc

SEQ ID NO: 23392 - DNA, 20 bp, Artificial Sequence
  ALK Forward Primer
atgcccatcctctttgtgaa

SEQ ID NO: 23393 - DNA, 24 bp, Artificial Sequence
  ALK Forward Primer
tggaaaagatacaacaaagttcca

SEQ ID NO: 23394 - DNA, 20 bp, Artificial Sequence
  ALK Forward Primer
atggaaaggggttggagtct

SEQ ID NO: 23395 - DNA, 20 bp, Artificial Sequence
  ALK Forward Primer
gacaggagaaaacagcaccc

SEQ ID NO: 23396 - DNA, 20 bp, Artificial Sequence
  ALK Forward Primer
aagcaagcaaacaacagcaa

SEQ ID NO: 23397 - DNA, 20 bp, Artificial Sequence
  ALK Forward Primer
tgccgagatctccaaactct

SEQ ID NO: 23398 - DNA, 20 bp, Artificial Sequence
  ALK Forward Primer
aatcaaatcaagcaaacggg

SEQ ID NO: 23399 - DNA, 20 bp, Artificial Sequence
  ALK Forward Primer
caggaagctgactgaggagg

SEQ ID NO: 23400 - DNA, 24 bp, Artificial Sequence
  ALK Forward Primer
tgacacagtgatacaatcagagga

SEQ ID NO: 23401 - DNA, 20 bp, Artificial Sequence
  ALK Forward Primer
taaaggcatgtcttggcaca

SEQ ID NO: 23402 - DNA, 20 bp, Artificial Sequence
  ALK Forward Primer
gaggagatggagggtaaggg

SEQ ID NO: 23403 - DNA, 20 bp, Artificial Sequence
  ALK Forward Primer
tgctcaggaatgaggaatga

SEQ ID NO: 23404 - DNA, 20 bp, Artificial Sequence
  ALK Forward Primer
gcatttttggctgaattttg

SEQ ID NO: 23405 - DNA, 20 bp, Artificial Sequence
  ALK Forward Primer
gatgctcagagctgttgcag

SEQ ID NO: 23406 - DNA, 20 bp, Artificial Sequence
  ALK Forward Primer
ggttcccacatacccacatc

SEQ ID NO: 23407 - DNA, 20 bp, Artificial Sequence
  ALK Forward Primer
tccagtagaatgcgaaaggc

SEQ ID NO: 23408 - DNA, 20 bp, Artificial Sequence
  ALK Forward Primer
tagggcctaaggggagaaaa

SEQ ID NO: 23409 - DNA, 23 bp, Artificial Sequence
  ALK Forward Primer
ttctgctaacaaaacacctgaca

SEQ ID NO: 23410 - DNA, 20 bp, Artificial Sequence
  ALK Forward Primer
gggctggcaatggatagtaa

SEQ ID NO: 23411 - DNA, 20 bp, Artificial Sequence
  ALK Forward Primer
caagaaacagtggcagacga

SEQ ID NO: 23412 - DNA, 20 bp, Artificial Sequence
  ALK Forward Primer
agcccaaaccccaagtctta

SEQ ID NO: 23413 - DNA, 20 bp, Artificial Sequence
  ALK Forward Primer
gcatcaggggctcatacact

SEQ ID NO: 23414 - DNA, 20 bp, Artificial Sequence
  ALK Forward Primer
ctctacatcccctcttgcca

SEQ ID NO: 23415 - DNA, 20 bp, Artificial Sequence
  ALK Forward Primer
gctatgttctgccaagctcc

SEQ ID NO: 23416 - DNA, 20 bp, Artificial Sequence
  ALK Forward Primer
cagcgggtcttcaatagctc

SEQ ID NO: 23417 - DNA, 20 bp, Artificial Sequence
  ALK Forward Primer
aggaagggtcatggtcacag

SEQ ID NO: 23418 - DNA, 21 bp, Artificial Sequence
  ALK Forward Primer
tgagcacactgatgctttttc

SEQ ID NO: 23419 - DNA, 20 bp, Artificial Sequence
  ALK Forward Primer
aaactgctgttatggtgggc

SEQ ID NO: 23420 - DNA, 20 bp, Artificial Sequence
  ALK Forward Primer
aagccagtctttggttctgc

SEQ ID NO: 23421 - DNA, 20 bp, Artificial Sequence
  ALK Forward Primer
ttccttgatcttgggaatgc

SEQ ID NO: 23422 - DNA, 20 bp, Artificial Sequence
  ALK Forward Primer
ctctaagggagcccatttcc

SEQ ID NO: 23423 - DNA, 20 bp, Artificial Sequence
  ALK Forward Primer
tattgatcgggcctaactgc

SEQ ID NO: 23424 - DNA, 22 bp, Artificial Sequence
  ALK Forward Primer
gaaaaggtcaggtaggaatgga

SEQ ID NO: 23425 - DNA, 20 bp, Artificial Sequence
  ALK Forward Primer
caacatctgtcagggctgtg

SEQ ID NO: 23426 - DNA, 19 bp, Artificial Sequence
  ALK Forward Primer
atgtcaccaaaaggctccc

SEQ ID NO: 23427 - DNA, 20 bp, Artificial Sequence
  ALK Forward Primer
ctgggggatcaggagagaat

SEQ ID NO: 23428 - DNA, 21 bp, Artificial Sequence
  ALK Forward Primer
agcaggattgacagttggaga

SEQ ID NO: 23429 - DNA, 20 bp, Artificial Sequence
  ALK Forward Primer
gccagaggtggatcagagag

SEQ ID NO: 23430 - DNA, 20 bp, Artificial Sequence
  ALK Forward Primer
atttcccatcagccatcaag

SEQ ID NO: 23431 - DNA, 20 bp, Artificial Sequence
  ALK Forward Primer
tacattacgggctcttcgct

SEQ ID NO: 23432 - DNA, 21 bp, Artificial Sequence
  ALK Forward Primer
cacagttttgctgtaggacca

SEQ ID NO: 23433 - DNA, 20 bp, Artificial Sequence
  ALK Forward Primer
tcctcagtccagtccaacaa

SEQ ID NO: 23434 - DNA, 20 bp, Artificial Sequence
  ALK Forward Primer
ctccaggattccaccaagtg

SEQ ID NO: 23435 - DNA, 24 bp, Artificial Sequence
  ALK Forward Primer
gagagggagacagaagaagaaaga

SEQ ID NO: 23436 - DNA, 20 bp, Artificial Sequence
  ALK Forward Primer
gattgaacccaggaatccaa

SEQ ID NO: 23437 - DNA, 20 bp, Artificial Sequence
  ALK Forward Primer
ttctcacaggactctgccct

SEQ ID NO: 23438 - DNA, 21 bp, Artificial Sequence
  ALK Forward Primer
cagctttaagaaaattggcga

SEQ ID NO: 23439 - DNA, 20 bp, Artificial Sequence
  ALK Forward Primer
atgtgacttgcaaaaatgcg

SEQ ID NO: 23440 - DNA, 20 bp, Artificial Sequence
  ALK Forward Primer
cgttccccttttaatgacga

SEQ ID NO: 23441 - DNA, 27 bp, Artificial Sequence
  ALK Forward Primer
tctctaactatatgaaaatggaaacca

SEQ ID NO: 23442 - DNA, 20 bp, Artificial Sequence
  ALK Forward Primer
ggccactccctcagtaaaca

SEQ ID NO: 23443 - DNA, 20 bp, Artificial Sequence
  ALK Forward Primer
gtgctgggtaggggatacaa

SEQ ID NO: 23444 - DNA, 20 bp, Artificial Sequence
  ALK Forward Primer
ggaaggctttacaagggagc

SEQ ID NO: 23445 - DNA, 20 bp, Artificial Sequence
  ALK Forward Primer
aaccaaatgtcccaaccaaa

SEQ ID NO: 23446 - DNA, 20 bp, Artificial Sequence
  ALK Forward Primer
acctcacagcctctgtctgc

SEQ ID NO: 23447 - DNA, 20 bp, Artificial Sequence
  ALK Forward Primer
ggaacgagtgtctagctgcc

SEQ ID NO: 23448 - DNA, 20 bp, Artificial Sequence
  ALK Forward Primer
agggctaaggaacaagagcc

SEQ ID NO: 23449 - DNA, 20 bp, Artificial Sequence
  ALK Forward Primer
cctcctatgggcactgtgat

SEQ ID NO: 23450 - DNA, 20 bp, Artificial Sequence
  ALK Forward Primer
gccaaccaaccaatttgact

SEQ ID NO: 23451 - DNA, 20 bp, Artificial Sequence
  ALK Forward Primer
ccctagactggggtgaatga

SEQ ID NO: 23452 - DNA, 20 bp, Artificial Sequence
  ALK Forward Primer
caggcctcagtttcctgttt

SEQ ID NO: 23453 - DNA, 20 bp, Artificial Sequence
  ALK Forward Primer
tggggctctagggaagaaat

SEQ ID NO: 23454 - DNA, 20 bp, Artificial Sequence
  ALK Forward Primer
tcaccactgcccagatgata

SEQ ID NO: 23455 - DNA, 20 bp, Artificial Sequence
  ALK Forward Primer
cgggtgattcagatgcacta

SEQ ID NO: 23456 - DNA, 19 bp, Artificial Sequence
  ALK Forward Primer
aaatggagggatggggaat

SEQ ID NO: 23457 - DNA, 21 bp, Artificial Sequence
  ALK Forward Primer
gggaaaaactcatttgaaccc

SEQ ID NO: 23458 - DNA, 20 bp, Artificial Sequence
  ALK Forward Primer
actcatcgaaatccatccca

SEQ ID NO: 23459 - DNA, 26 bp, Artificial Sequence
  ALK Forward Primer
tctttggtgggtagtattatgaacaa

SEQ ID NO: 23460 - DNA, 20 bp, Artificial Sequence
  ALK Forward Primer
cacacacagccttgaaggag

SEQ ID NO: 23461 - DNA, 20 bp, Artificial Sequence
  ALK Forward Primer
tgcatctgaacaaatgggaa

SEQ ID NO: 23462 - DNA, 21 bp, Artificial Sequence
  ALK Forward Primer
tggagaaacaatatggcaaaa

SEQ ID NO: 23463 - DNA, 20 bp, Artificial Sequence
  ALK Forward Primer
cttgccatttgctcatgcta

SEQ ID NO: 23464 - DNA, 20 bp, Artificial Sequence
  ALK Forward Primer
tctaggatccctgaaggcag

SEQ ID NO: 23465 - DNA, 20 bp, Artificial Sequence
  ALK Forward Primer
cccaagaatttgggtcaaga

SEQ ID NO: 23466 - DNA, 20 bp, Artificial Sequence
  ALK Forward Primer
gattcctcacacctgccagt

SEQ ID NO: 23467 - DNA, 20 bp, Artificial Sequence
  ALK Forward Primer
aaagtacaaaaacccccgct

SEQ ID NO: 23468 - DNA, 20 bp, Artificial Sequence
  ALK Forward Primer
gccttggctctattcctcct

SEQ ID NO: 23469 - DNA, 20 bp, Artificial Sequence
  ALK Forward Primer
ccacatttggctgatcaaga

SEQ ID NO: 23470 - DNA, 20 bp, Artificial Sequence
  ALK Forward Primer
acagtccggaatgaggacac

SEQ ID NO: 23471 - DNA, 20 bp, Artificial Sequence
  ALK Forward Primer
tttcttcatcattcccagcc

SEQ ID NO: 23472 - DNA, 20 bp, Artificial Sequence
  ALK Forward Primer
cactgaagtgtggcaacagg

SEQ ID NO: 23473 - DNA, 20 bp, Artificial Sequence
  ALK Forward Primer
gcaatttggggagctgagta

SEQ ID NO: 23474 - DNA, 20 bp, Artificial Sequence
  ALK Forward Primer
cccaagaacctacagatggc

SEQ ID NO: 23475 - DNA, 20 bp, Artificial Sequence
  ALK Forward Primer
ttccttggttttgccttctg

SEQ ID NO: 23476 - DNA, 24 bp, Artificial Sequence
  ALK Forward Primer
aaaatgcaaataacctaaatggga

SEQ ID NO: 23477 - DNA, 20 bp, Artificial Sequence
  ALK Forward Primer
tagcccattaggcagcagat

SEQ ID NO: 23478 - DNA, 20 bp, Artificial Sequence
  ALK Forward Primer
tcagggtgctggtctttacc

SEQ ID NO: 23479 - DNA, 20 bp, Artificial Sequence
  ALK Forward Primer
atatgggctctgcctcaatg

SEQ ID NO: 23480 - DNA, 25 bp, Artificial Sequence
  ALK Forward Primer
aaatctctttttctttttgctcatt

SEQ ID NO: 23481 - DNA, 20 bp, Artificial Sequence
  ALK Forward Primer
atgccatctcattccactcc

SEQ ID NO: 23482 - DNA, 20 bp, Artificial Sequence
  ALK Forward Primer
cacctctccatccctgactc

SEQ ID NO: 23483 - DNA, 20 bp, Artificial Sequence
  ALK Forward Primer
tgcaaagcctaaatcacacg

SEQ ID NO: 23484 - DNA, 20 bp, Artificial Sequence
  ALK Forward Primer
tgtgggcaaacacaaaggta

SEQ ID NO: 23485 - DNA, 20 bp, Artificial Sequence
  ALK Forward Primer
gtatgtacaggcacgcatgg

SEQ ID NO: 23486 - DNA, 20 bp, Artificial Sequence
  ALK Forward Primer
agcccacaaatagtgccttg

SEQ ID NO: 23487 - DNA, 20 bp, Artificial Sequence
  ALK Forward Primer
gcggtgtgagtcttgtgcta

SEQ ID NO: 23488 - DNA, 20 bp, Artificial Sequence
  ALK Forward Primer
atgccagcttcatacaagcc

SEQ ID NO: 23489 - DNA, 20 bp, Artificial Sequence
  ALK Forward Primer
cacttgccaagctccttttt

SEQ ID NO: 23490 - DNA, 20 bp, Artificial Sequence
  ALK Forward Primer
acatggataatggaggtggc

SEQ ID NO: 23491 - DNA, 20 bp, Artificial Sequence
  ALK Forward Primer
agagtgagctgagacccagg

SEQ ID NO: 23492 - DNA, 20 bp, Artificial Sequence
  ALK Forward Primer
tgcggcaaacacaactttat

SEQ ID NO: 23493 - DNA, 21 bp, Artificial Sequence
  ALK Forward Primer
tcccttattgatgacaccagg

SEQ ID NO: 23494 - DNA, 20 bp, Artificial Sequence
  ALK Forward Primer
ctcaaaacagccttccttgc

SEQ ID NO: 23495 - DNA, 20 bp, Artificial Sequence
  ALK Forward Primer
ctttatcctggtttgggggt

SEQ ID NO: 23496 - DNA, 21 bp, Artificial Sequence
  ALK Forward Primer
tccagcttcactgagaaagga

SEQ ID NO: 23497 - DNA, 20 bp, Artificial Sequence
  ALK Forward Primer
ttggtaggatggaaagccag

SEQ ID NO: 23498 - DNA, 21 bp, Artificial Sequence
  ALK Forward Primer
cactgacaggtgtgagatgga

SEQ ID NO: 23499 - DNA, 20 bp, Artificial Sequence
  ALK Forward Primer
ttggtatctgtctacgcccc

SEQ ID NO: 23500 - DNA, 20 bp, Artificial Sequence
  ALK Forward Primer
tcccgaaggaaggacaagta

SEQ ID NO: 23501 - DNA, 20 bp, Artificial Sequence
  ALK Forward Primer
tacaattaggtctcggggca

SEQ ID NO: 23502 - DNA, 20 bp, Artificial Sequence
  ALK Forward Primer
cacttctgaggacccaccat

SEQ ID NO: 23503 - DNA, 20 bp, Artificial Sequence
  ALK Forward Primer
cttcatggaggaggctgaag

SEQ ID NO: 23504 - DNA, 20 bp, Artificial Sequence
  ALK Forward Primer
aggagggaaagcaggctaag

SEQ ID NO: 23505 - DNA, 20 bp, Artificial Sequence
  ALK Forward Primer
cagtcccataagcagcttcc

SEQ ID NO: 23506 - DNA, 20 bp, Artificial Sequence
  ALK Forward Primer
cagactcaggtccctggaag

SEQ ID NO: 23507 - DNA, 20 bp, Artificial Sequence
  ALK Forward Primer
gggccattagtggaaaatca

SEQ ID NO: 23508 - DNA, 20 bp, Artificial Sequence
  ALK Forward Primer
tctctgagtgaccccgctat

SEQ ID NO: 23509 - DNA, 20 bp, Artificial Sequence
  ALK Forward Primer
ggttgcctggaatcaactgt

SEQ ID NO: 23510 - DNA, 20 bp, Artificial Sequence
  ALK Forward Primer
gaggcgctggtagaaaactg

SEQ ID NO: 23511 - DNA, 20 bp, Artificial Sequence
  ALK Forward Primer
acagtggcctcctaatccaa

SEQ ID NO: 23512 - DNA, 20 bp, Artificial Sequence
  ALK Forward Primer
aaaggcacagaggctgagac

SEQ ID NO: 23513 - DNA, 20 bp, Artificial Sequence
  ALK Forward Primer
cacagcttcaacactgccac

SEQ ID NO: 23514 - DNA, 20 bp, Artificial Sequence
  ALK Forward Primer
ggggacaagatgagaggtga

SEQ ID NO: 23515 - DNA, 20 bp, Artificial Sequence
  ALK Forward Primer
gtatttcctctcgccatcca

SEQ ID NO: 23516 - DNA, 21 bp, Artificial Sequence
  ALK Forward Primer
gcaagtgtgtgtgtttgaagc

SEQ ID NO: 23517 - DNA, 20 bp, Artificial Sequence
  ALK Forward Primer
agctctggagcctcaatctg

SEQ ID NO: 23518 - DNA, 20 bp, Artificial Sequence
  ALK Forward Primer
aacttctgagggtggcacat

SEQ ID NO: 23519 - DNA, 20 bp, Artificial Sequence
  ALK Forward Primer
cctaggtttgctctgctgct

SEQ ID NO: 23520 - DNA, 20 bp, Artificial Sequence
  ALK Forward Primer
ctgcattctcccatggtgta

SEQ ID NO: 23521 - DNA, 20 bp, Artificial Sequence
  ALK Forward Primer
gaagtgactgcttgccttcc

SEQ ID NO: 23522 - DNA, 20 bp, Artificial Sequence
  ALK Forward Primer
cccatgccatgagagaagat

SEQ ID NO: 23523 - DNA, 20 bp, Artificial Sequence
  ALK Forward Primer
atgttgttctcaggggttgg

SEQ ID NO: 23524 - DNA, 20 bp, Artificial Sequence
  ALK Forward Primer
tgccagaggaagaagaggaa

SEQ ID NO: 23525 - DNA, 20 bp, Artificial Sequence
  ALK Forward Primer
agggcatctgtaggggttct

SEQ ID NO: 23526 - DNA, 20 bp, Artificial Sequence
  ALK Forward Primer
tctctcaggccctgtatgct

SEQ ID NO: 23527 - DNA, 20 bp, Artificial Sequence
  ALK Forward Primer
gccccctatctaacgaggag

SEQ ID NO: 23528 - DNA, 20 bp, Artificial Sequence
  ALK Forward Primer
atgatcagtggctaatgccc

SEQ ID NO: 23529 - DNA, 20 bp, Artificial Sequence
  ALK Forward Primer
attccctgttaggtcctggg

SEQ ID NO: 23530 - DNA, 20 bp, Artificial Sequence
  ALK Forward Primer
gtggtccaggcagagatgat

SEQ ID NO: 23531 - DNA, 21 bp, Artificial Sequence
  ALK Forward Primer
tggcctgctattctgtaggaa

SEQ ID NO: 23532 - DNA, 20 bp, Artificial Sequence
  ALK Forward Primer
tcccaggagaaagtccaaca

SEQ ID NO: 23533 - DNA, 20 bp, Artificial Sequence
  ALK Forward Primer
caaaaaggtttgccttcagc

SEQ ID NO: 23534 - DNA, 20 bp, Artificial Sequence
  ALK Forward Primer
cttcctgtggctcactgtca

SEQ ID NO: 23535 - DNA, 20 bp, Artificial Sequence
  ALK Forward Primer
tgagatgcagtctccaggtg

SEQ ID NO: 23536 - DNA, 20 bp, Artificial Sequence
  ALK Forward Primer
ccaaaatcaccagtgcaaga

SEQ ID NO: 23537 - DNA, 20 bp, Artificial Sequence
  ALK Forward Primer
atcactcccttggcaaactg

SEQ ID NO: 23538 - DNA, 21 bp, Artificial Sequence
  ALK Forward Primer
ttaatcattgcaggggaaaaa

SEQ ID NO: 23539 - DNA, 20 bp, Artificial Sequence
  ALK Forward Primer
ctctttatgccctgaggcac

SEQ ID NO: 23540 - DNA, 27 bp, Artificial Sequence
  ALK Forward Primer
caagattcaacacctaatagttagcct

SEQ ID NO: 23541 - DNA, 20 bp, Artificial Sequence
  ALK Forward Primer
tcctgaataggcgaaccatt

SEQ ID NO: 23542 - DNA, 20 bp, Artificial Sequence
  ALK Forward Primer
gaaaagcagagggtggagaa

SEQ ID NO: 23543 - DNA, 20 bp, Artificial Sequence
  ALK Forward Primer
ttatctttgggggaagaggg

SEQ ID NO: 23544 - DNA, 20 bp, Artificial Sequence
  ALK Forward Primer
ccacccatttatccatccag

SEQ ID NO: 23545 - DNA, 20 bp, Artificial Sequence
  ALK Forward Primer
tagggattgacagggcaaag

SEQ ID NO: 23546 - DNA, 20 bp, Artificial Sequence
  ALK Forward Primer
ctgcctgttttcaggtccat

SEQ ID NO: 23547 - DNA, 20 bp, Artificial Sequence
  ALK Forward Primer
cccagccctcattatctcaa

SEQ ID NO: 23548 - DNA, 20 bp, Artificial Sequence
  ALK Forward Primer
gcttctttctgcctgagagc

SEQ ID NO: 23549 - DNA, 22 bp, Artificial Sequence
  ALK Forward Primer
tgtggaaagtaagtagggtggg

SEQ ID NO: 23550 - DNA, 20 bp, Artificial Sequence
  ALK Forward Primer
ccagagtttcctgatctgcc

SEQ ID NO: 23551 - DNA, 20 bp, Artificial Sequence
  ALK Forward Primer
ggctggtgagtgggtaaatc

SEQ ID NO: 23552 - DNA, 21 bp, Artificial Sequence
  ALK Forward Primer
ggggaaaggtatttccatctg

SEQ ID NO: 23553 - DNA, 20 bp, Artificial Sequence
  ALK Forward Primer
tacccggccattgaaagtag

SEQ ID NO: 23554 - DNA, 20 bp, Artificial Sequence
  ALK Forward Primer
tggctactgcagcaaatcag

SEQ ID NO: 23555 - DNA, 20 bp, Artificial Sequence
  ALK Forward Primer
atccctgatcccactgtgaa

SEQ ID NO: 23556 - DNA, 20 bp, Artificial Sequence
  ALK Forward Primer
aggagattactggcaagggg

SEQ ID NO: 23557 - DNA, 20 bp, Artificial Sequence
  ALK Forward Primer
tggtcccattgaaaaccatt

SEQ ID NO: 23558 - DNA, 20 bp, Artificial Sequence
  ALK Forward Primer
caattcagaccagcaaagca

SEQ ID NO: 23559 - DNA, 20 bp, Artificial Sequence
  ALK Forward Primer
ctgagtgctcccttctctgg

SEQ ID NO: 23560 - DNA, 20 bp, Artificial Sequence
  ALK Forward Primer
tgctacgttataccgcctcc

SEQ ID NO: 23561 - DNA, 22 bp, Artificial Sequence
  ALK Forward Primer
cagttccaaaatgtggattcct

SEQ ID NO: 23562 - DNA, 20 bp, Artificial Sequence
  ALK Forward Primer
actatggctgcagtatggct

SEQ ID NO: 23563 - DNA, 20 bp, Artificial Sequence
  ALK Forward Primer
tcaatggccatcaaacactg

SEQ ID NO: 23564 - DNA, 25 bp, Artificial Sequence
  ALK Forward Primer
aaaaagacaaaataatgcctagaga

SEQ ID NO: 23565 - DNA, 20 bp, Artificial Sequence
  ALK Forward Primer
gtgctcttccatttgcacct

SEQ ID NO: 23566 - DNA, 20 bp, Artificial Sequence
  ALK Forward Primer
aattgaaacgggcagaattg

SEQ ID NO: 23567 - DNA, 20 bp, Artificial Sequence
  ALK Forward Primer
cgaagaatctgaatctgggg

SEQ ID NO: 23568 - DNA, 20 bp, Artificial Sequence
  ALK Forward Primer
ggcagggctcatttctatca

SEQ ID NO: 23569 - DNA, 20 bp, Artificial Sequence
  ALK Forward Primer
ttgtgaggtgaggttctccc

SEQ ID NO: 23570 - DNA, 20 bp, Artificial Sequence
  ALK Forward Primer
gggcagagtgatgtccaagt

SEQ ID NO: 23571 - DNA, 20 bp, Artificial Sequence
  ALK Forward Primer
acctgccctcatgaaacttg

SEQ ID NO: 23572 - DNA, 20 bp, Artificial Sequence
  ALK Forward Primer
ccggaactgctatctgaagg

SEQ ID NO: 23573 - DNA, 20 bp, Artificial Sequence
  ALK Forward Primer
acctcgtgtgccattttagg

SEQ ID NO: 23574 - DNA, 22 bp, Artificial Sequence
  ALK Forward Primer
aaggttagaaccattgtcctgg

SEQ ID NO: 23575 - DNA, 20 bp, Artificial Sequence
  ALK Forward Primer
gccagggttctctgtagcac

SEQ ID NO: 23576 - DNA, 20 bp, Artificial Sequence
  ALK Forward Primer
actggaactcaacagcaccc

SEQ ID NO: 23577 - DNA, 22 bp, Artificial Sequence
  ALK Forward Primer
tggtcagtgctgtaccaaagtc

SEQ ID NO: 23578 - DNA, 20 bp, Artificial Sequence
  ALK Forward Primer
agggaaacgtgaaaggaggt

SEQ ID NO: 23579 - DNA, 19 bp, Artificial Sequence
  ALK Forward Primer
aaatgccccaggagctatg

SEQ ID NO: 23580 - DNA, 20 bp, Artificial Sequence
  ALK Forward Primer
ctctgaagccaaagaatggc

SEQ ID NO: 23581 - DNA, 20 bp, Artificial Sequence
  ALK Forward Primer
gtggcagggatttccaagta

SEQ ID NO: 23582 - DNA, 20 bp, Artificial Sequence
  ALK Forward Primer
tcatgctgaccaccttgttc

SEQ ID NO: 23583 - DNA, 20 bp, Artificial Sequence
  ALK Forward Primer
ttgttgagggttacccagga

SEQ ID NO: 23584 - DNA, 20 bp, Artificial Sequence
  ALK Forward Primer
ggtttgtgttcccaggacag

SEQ ID NO: 23585 - DNA, 20 bp, Artificial Sequence
  ALK Forward Primer
gctcactgtctgctgtccct

SEQ ID NO: 23586 - DNA, 20 bp, Artificial Sequence
  ALK Forward Primer
ctaagtgctcggccaaatgt

SEQ ID NO: 23587 - DNA, 20 bp, Artificial Sequence
  ALK Forward Primer
atctcgtggtgccaattttt

SEQ ID NO: 23588 - DNA, 20 bp, Artificial Sequence
  ALK Forward Primer
agctcacaaacatcacgctg

SEQ ID NO: 23589 - DNA, 20 bp, Artificial Sequence
  ALK Forward Primer
acagggaattctcattggca

SEQ ID NO: 23590 - DNA, 20 bp, Artificial Sequence
  ALK Forward Primer
ccccgggaatacagagaaat

SEQ ID NO: 23591 - DNA, 20 bp, Artificial Sequence
  ALK Forward Primer
tctctgctccaaacccctta

SEQ ID NO: 23592 - DNA, 20 bp, Artificial Sequence
  ALK Forward Primer
ctggtctgggaaccacactt

SEQ ID NO: 23593 - DNA, 20 bp, Artificial Sequence
  ALK Forward Primer
gactggccaaaagaaggtca

SEQ ID NO: 23594 - DNA, 20 bp, Artificial Sequence
  ALK Forward Primer
atgaaatctgtgtggccctc

SEQ ID NO: 23595 - DNA, 20 bp, Artificial Sequence
  ALK Forward Primer
atatgggaatcgaaagcagc

SEQ ID NO: 23596 - DNA, 20 bp, Artificial Sequence
  ALK Forward Primer
atccaggctttgcatcctta

SEQ ID NO: 23597 - DNA, 20 bp, Artificial Sequence
  ALK Forward Primer
gccccttcttccttctacca

SEQ ID NO: 23598 - DNA, 20 bp, Artificial Sequence
  ALK Forward Primer
gccacgtgtagtcttcccat

SEQ ID NO: 23599 - DNA, 21 bp, Artificial Sequence
  ALK Forward Primer
gaaagatgtgaggtgactgcc

SEQ ID NO: 23600 - DNA, 20 bp, Artificial Sequence
  ALK Forward Primer
catgggaagtgcctgatgta

SEQ ID NO: 23601 - DNA, 20 bp, Artificial Sequence
  ALK Forward Primer
actgaagggatgagtgggtg

SEQ ID NO: 23602 - DNA, 23 bp, Artificial Sequence
  ALK Forward Primer
tctgtgtgtaagtgtgtgtgtcg

SEQ ID NO: 23603 - DNA, 20 bp, Artificial Sequence
  ALK Forward Primer
ggaggttgatgggaaggaat

SEQ ID NO: 23604 - DNA, 20 bp, Artificial Sequence
  ALK Forward Primer
acccttggctaaggctgaat

SEQ ID NO: 23605 - DNA, 20 bp, Artificial Sequence
  ALK Forward Primer
ataaaatacgaggggctggg

SEQ ID NO: 23606 - DNA, 20 bp, Artificial Sequence
  ALK Forward Primer
agccagactcaggcacaagt

SEQ ID NO: 23607 - DNA, 20 bp, Artificial Sequence
  ALK Forward Primer
ggaggaaatgaccaaagcaa

SEQ ID NO: 23608 - DNA, 20 bp, Artificial Sequence
  ALK Forward Primer
tgtggtctgaggcttatccc

SEQ ID NO: 23609 - DNA, 20 bp, Artificial Sequence
  ALK Forward Primer
ctgactccagggtctgtgct

SEQ ID NO: 23610 - DNA, 20 bp, Artificial Sequence
  ALK Forward Primer
accctttgaatgcatgttcc

SEQ ID NO: 23611 - DNA, 20 bp, Artificial Sequence
  ALK Forward Primer
caaaagaacctccagtccca

SEQ ID NO: 23612 - DNA, 20 bp, Artificial Sequence
  ALK Forward Primer
tgtcagccaagacctctcag

SEQ ID NO: 23613 - DNA, 20 bp, Artificial Sequence
  ALK Forward Primer
gcaacttccccacttttcac

SEQ ID NO: 23614 - DNA, 20 bp, Artificial Sequence
  ALK Forward Primer
cctttcagctgctcctgagt

SEQ ID NO: 23615 - DNA, 22 bp, Artificial Sequence
  ALK Forward Primer
ggaagtcacctaacattctgcc

SEQ ID NO: 23616 - DNA, 20 bp, Artificial Sequence
  ALK Forward Primer
catgggagaaagcaaggaaa

SEQ ID NO: 23617 - DNA, 20 bp, Artificial Sequence
  ALK Forward Primer
ccttcagagcatggttccag

SEQ ID NO: 23618 - DNA, 23 bp, Artificial Sequence
  ALK Forward Primer
tcgtaattaaaggggttgagaga

SEQ ID NO: 23619 - DNA, 20 bp, Artificial Sequence
  ALK Forward Primer
ggtccttttcgccacttaca

SEQ ID NO: 23620 - DNA, 20 bp, Artificial Sequence
  ALK Forward Primer
gcatgtcaaagatggcaaaa

SEQ ID NO: 23621 - DNA, 20 bp, Artificial Sequence
  ALK Forward Primer
cccaaaaggatattcagcca

SEQ ID NO: 23622 - DNA, 20 bp, Artificial Sequence
  ALK Forward Primer
attccaagcttgagcaccct

SEQ ID NO: 23623 - DNA, 20 bp, Artificial Sequence
  ALK Forward Primer
gctgctcagacagcagtgac

SEQ ID NO: 23624 - DNA, 20 bp, Artificial Sequence
  ALK Forward Primer
tttctctctggccttccaaa

SEQ ID NO: 23625 - DNA, 20 bp, Artificial Sequence
  ALK Forward Primer
gagtggtcggtcaggagaga

SEQ ID NO: 23626 - DNA, 20 bp, Artificial Sequence
  ALK Forward Primer
tctggacagacttgtgaccg

SEQ ID NO: 23627 - DNA, 20 bp, Artificial Sequence
  ALK Forward Primer
acccatataatccatgggca

SEQ ID NO: 23628 - DNA, 23 bp, Artificial Sequence
  ALK Forward Primer
gcatcacaaatcagtaaggaagg

SEQ ID NO: 23629 - DNA, 20 bp, Artificial Sequence
  ALK Forward Primer
gattgaattgcatgccaaaa

SEQ ID NO: 23630 - DNA, 21 bp, Artificial Sequence
  ALK Forward Primer
tggtgttggttatcttaggga

SEQ ID NO: 23631 - DNA, 20 bp, Artificial Sequence
  ALK Forward Primer
actgttttacgcatcagccc

SEQ ID NO: 23632 - DNA, 20 bp, Artificial Sequence
  ALK Forward Primer
ctggaatcctactggacgga

SEQ ID NO: 23633 - DNA, 20 bp, Artificial Sequence
  ALK Forward Primer
agcaatcacaaattgagggc

SEQ ID NO: 23634 - DNA, 20 bp, Artificial Sequence
  ALK Forward Primer
tcagagaggagaccccagaa

SEQ ID NO: 23635 - DNA, 20 bp, Artificial Sequence
  ALK Forward Primer
caaatcctctgtcccactgc

SEQ ID NO: 23636 - DNA, 20 bp, Artificial Sequence
  ALK Forward Primer
tgacagctcagtgctatggg

SEQ ID NO: 23637 - DNA, 20 bp, Artificial Sequence
  ALK Forward Primer
cactggagcaacagaagctg

SEQ ID NO: 23638 - DNA, 20 bp, Artificial Sequence
  ALK Forward Primer
acgaagccagacaggaagaa

SEQ ID NO: 23639 - DNA, 20 bp, Artificial Sequence
  ALK Forward Primer
atgacctccccaaccctaag

SEQ ID NO: 23640 - DNA, 20 bp, Artificial Sequence
  ALK Forward Primer
tgctgtgttcgtgtgacaaa

SEQ ID NO: 23641 - DNA, 20 bp, Artificial Sequence
  ALK Forward Primer
aagcaacaggggagacaaga

SEQ ID NO: 23642 - DNA, 20 bp, Artificial Sequence
  ALK Forward Primer
tcagaccctccaaactggaa

SEQ ID NO: 23643 - DNA, 20 bp, Artificial Sequence
  ALK Forward Primer
gccttccctgtccatcctat

SEQ ID NO: 23644 - DNA, 20 bp, Artificial Sequence
  ALK Forward Primer
cagcatatcatgggtgacga

SEQ ID NO: 23645 - DNA, 20 bp, Artificial Sequence
  ALK Forward Primer
tcccagacccagaagagaga

SEQ ID NO: 23646 - DNA, 20 bp, Artificial Sequence
  ALK Forward Primer
ggatttgattgcctccaaga

SEQ ID NO: 23647 - DNA, 20 bp, Artificial Sequence
  ALK Forward Primer
gctcacatgacttgcctgag

SEQ ID NO: 23648 - DNA, 20 bp, Artificial Sequence
  ALK Forward Primer
gggagctggaaagcattgta

SEQ ID NO: 23649 - DNA, 20 bp, Artificial Sequence
  ALK Forward Primer
gaaacaggactgatgccagg

SEQ ID NO: 23650 - DNA, 20 bp, Artificial Sequence
  ALK Forward Primer
atgcagcaacacactgcttc

SEQ ID NO: 23651 - DNA, 20 bp, Artificial Sequence
  ALK Forward Primer
acgtgcccacttatgaaagg

SEQ ID NO: 23652 - DNA, 20 bp, Artificial Sequence
  ALK Forward Primer
agcagatccaagaagctcca

SEQ ID NO: 23653 - DNA, 20 bp, Artificial Sequence
  ALK Forward Primer
tcctgctgaaaagctgatga

SEQ ID NO: 23654 - DNA, 20 bp, Artificial Sequence
  ALK Forward Primer
caaggttttgtggccacttt

SEQ ID NO: 23655 - DNA, 20 bp, Artificial Sequence
  ALK Forward Primer
catttccaaagagctgagcc

SEQ ID NO: 23656 - DNA, 20 bp, Artificial Sequence
  ALK Forward Primer
acttttgtacttgtggggcg

SEQ ID NO: 23657 - DNA, 20 bp, Artificial Sequence
  ALK Forward Primer
ccccaccctcttcatctttt

SEQ ID NO: 23658 - DNA, 20 bp, Artificial Sequence
  ALK Forward Primer
ttctgatctgaccctcagcc

SEQ ID NO: 23659 - DNA, 20 bp, Artificial Sequence
  ALK Forward Primer
actcgactgtcagaccggaa

SEQ ID NO: 23660 - DNA, 20 bp, Artificial Sequence
  ALK Forward Primer
attccccaacctggtctttt

SEQ ID NO: 23661 - DNA, 20 bp, Artificial Sequence
  ALK Forward Primer
catgtgtagtaccctggccc

SEQ ID NO: 23662 - DNA, 20 bp, Artificial Sequence
  ALK Forward Primer
ttagctcaacacctggcaaa

SEQ ID NO: 23663 - DNA, 20 bp, Artificial Sequence
  ALK Forward Primer
gatagctggtcttgagggca

SEQ ID NO: 23664 - DNA, 20 bp, Artificial Sequence
  ALK Forward Primer
tcaaacagtcacaagcctgc

SEQ ID NO: 23665 - DNA, 21 bp, Artificial Sequence
  ALK Forward Primer
tcttccattgcaccaaaattc

SEQ ID NO: 23666 - DNA, 20 bp, Artificial Sequence
  ALK Forward Primer
gccctctgggtaccttttct

SEQ ID NO: 23667 - DNA, 20 bp, Artificial Sequence
  ALK Forward Primer
tgttccagctaccgaaccag

SEQ ID NO: 23668 - DNA, 23 bp, Artificial Sequence
  ALK Forward Primer
ttgcatcttttacattttcattg

SEQ ID NO: 23669 - DNA, 20 bp, Artificial Sequence
  ALK Forward Primer
gggagcatctctgtctccaa

SEQ ID NO: 23670 - DNA, 20 bp, Artificial Sequence
  ALK Forward Primer
ctggaccctcttgtgaaagc

SEQ ID NO: 23671 - DNA, 20 bp, Artificial Sequence
  ALK Forward Primer
ctctgccccttagcactttg

SEQ ID NO: 23672 - DNA, 20 bp, Artificial Sequence
  ALK Forward Primer
ggcagttaggtttgttccca

SEQ ID NO: 23673 - DNA, 20 bp, Artificial Sequence
  ALK Forward Primer
cccttgcctcaattctgtgt

SEQ ID NO: 23674 - DNA, 20 bp, Artificial Sequence
  ALK Forward Primer
ttcttcaagggggttttgtg

SEQ ID NO: 23675 - DNA, 21 bp, Artificial Sequence
  ALK Forward Primer
ggagaaactccagggtacagg

SEQ ID NO: 23676 - DNA, 20 bp, Artificial Sequence
  ALK Forward Primer
atgacaaatctgaggcccat

SEQ ID NO: 23677 - DNA, 20 bp, Artificial Sequence
  ALK Forward Primer
caaggaagggcacagtcttc

SEQ ID NO: 23678 - DNA, 20 bp, Artificial Sequence
  ALK Forward Primer
catggaaggatgtggtttcc

SEQ ID NO: 23679 - DNA, 20 bp, Artificial Sequence
  ALK Forward Primer
gggtagttccactgtcccct

SEQ ID NO: 23680 - DNA, 20 bp, Artificial Sequence
  ALK Forward Primer
ccccacactccagactgact

SEQ ID NO: 23681 - DNA, 20 bp, Artificial Sequence
  ALK Forward Primer
agggattcttctcaggccat

SEQ ID NO: 23682 - DNA, 20 bp, Artificial Sequence
  ALK Forward Primer
caccagctcccaattcattc

SEQ ID NO: 23683 - DNA, 20 bp, Artificial Sequence
  ALK Forward Primer
ttcaggtctgaattccctgg

SEQ ID NO: 23684 - DNA, 20 bp, Artificial Sequence
  ALK Forward Primer
tagcagagtgcttggcacat

SEQ ID NO: 23685 - DNA, 20 bp, Artificial Sequence
  ALK Forward Primer
gcctctgtgaaatgggaaaa

SEQ ID NO: 23686 - DNA, 22 bp, Artificial Sequence
  ALK Forward Primer
caagtcatgtgcttcctttctg

SEQ ID NO: 23687 - DNA, 20 bp, Artificial Sequence
  ALK Forward Primer
ctgtggaggggtgacaactt

SEQ ID NO: 23688 - DNA, 19 bp, Artificial Sequence
  ALK Forward Primer
cctggtctgtggctgtgag

SEQ ID NO: 23689 - DNA, 20 bp, Artificial Sequence
  ALK Forward Primer
attgtgagcctccatctgct

SEQ ID NO: 23690 - DNA, 20 bp, Artificial Sequence
  ALK Forward Primer
cacagaagctgcaggacaaa

SEQ ID NO: 23691 - DNA, 20 bp, Artificial Sequence
  ALK Forward Primer
ttctcttgggaggcttttca

SEQ ID NO: 23692 - DNA, 20 bp, Artificial Sequence
  ALK Forward Primer
aggtggaaaggggaaagaga

SEQ ID NO: 23693 - DNA, 20 bp, Artificial Sequence
  ALK Forward Primer
agcaggcctgtctgattttt

SEQ ID NO: 23694 - DNA, 20 bp, Artificial Sequence
  ALK Forward Primer
gccttcgaagaaatctcagc

SEQ ID NO: 23695 - DNA, 20 bp, Artificial Sequence
  ALK Forward Primer
gagaagcttcagatggcacc

SEQ ID NO: 23696 - DNA, 20 bp, Artificial Sequence
  ALK Forward Primer
cacacccttgattgttgagc

SEQ ID NO: 23697 - DNA, 20 bp, Artificial Sequence
  ALK Forward Primer
cctgtcttgcccagatgaat

SEQ ID NO: 23698 - DNA, 20 bp, Artificial Sequence
  ALK Forward Primer
ctcctcttctggcttcctca

SEQ ID NO: 23699 - DNA, 20 bp, Artificial Sequence
  ALK Forward Primer
gactgggcttcacagaaagg

SEQ ID NO: 23700 - DNA, 20 bp, Artificial Sequence
  ALK Forward Primer
tcacttaaccccacagagcc

SEQ ID NO: 23701 - DNA, 20 bp, Artificial Sequence
  ALK Forward Primer
tgcttgcaaatttttccctt

SEQ ID NO: 23702 - DNA, 20 bp, Artificial Sequence
  ALK Forward Primer
atcaaacaacagggctgtcc

SEQ ID NO: 23703 - DNA, 20 bp, Artificial Sequence
  ALK Forward Primer
aattaggggtagggggtgtg

SEQ ID NO: 23704 - DNA, 20 bp, Artificial Sequence
  ALK Forward Primer
tgctggcaaaaagtgctaga

SEQ ID NO: 23705 - DNA, 20 bp, Artificial Sequence
  ALK Forward Primer
cctgcccatccaactgtact

SEQ ID NO: 23706 - DNA, 20 bp, Artificial Sequence
  ALK Forward Primer
ggttggtatcatccctgcac

SEQ ID NO: 23707 - DNA, 20 bp, Artificial Sequence
  ALK Forward Primer
tcaaacactcccttgtccct

SEQ ID NO: 23708 - DNA, 20 bp, Artificial Sequence
  ALK Forward Primer
aatttgggttttcctttggg

SEQ ID NO: 23709 - DNA, 20 bp, Artificial Sequence
  ALK Forward Primer
tcacaactcctggtcgagaa

SEQ ID NO: 23710 - DNA, 20 bp, Artificial Sequence
  ALK Forward Primer
gcataatgggacaggattgg

SEQ ID NO: 23711 - DNA, 20 bp, Artificial Sequence
  ALK Forward Primer
aatgtctggagctgggtgtc

SEQ ID NO: 23712 - DNA, 20 bp, Artificial Sequence
  ALK Forward Primer
aggagaggacatgtgggttg

SEQ ID NO: 23713 - DNA, 23 bp, Artificial Sequence
  ALK Forward Primer
gcttctgattcacataggtcagc

SEQ ID NO: 23714 - DNA, 20 bp, Artificial Sequence
  ALK Forward Primer
aattttgtgctttccccctt

SEQ ID NO: 23715 - DNA, 20 bp, Artificial Sequence
  ALK Forward Primer
gcctaccgctaaactgcaac

SEQ ID NO: 23716 - DNA, 20 bp, Artificial Sequence
  ALK Forward Primer
gcaaagcccatgtctgtttt

SEQ ID NO: 23717 - DNA, 20 bp, Artificial Sequence
  ALK Forward Primer
gtgcaacctggatcgtgtta

SEQ ID NO: 23718 - DNA, 20 bp, Artificial Sequence
  ALK Forward Primer
gcctcccgagtagcagaaat

SEQ ID NO: 23719 - DNA, 20 bp, Artificial Sequence
  ALK Forward Primer
gctgctgaaccctctgacat

SEQ ID NO: 23720 - DNA, 20 bp, Artificial Sequence
  ALK Forward Primer
gaggcctctgttccttcttg

SEQ ID NO: 23721 - DNA, 20 bp, Artificial Sequence
  ALK Forward Primer
tggatggatgccacactaga

SEQ ID NO: 23722 - DNA, 20 bp, Artificial Sequence
  ALK Forward Primer
ggcctgagacccacactaaa

SEQ ID NO: 23723 - DNA, 23 bp, Artificial Sequence
  ALK Forward Primer
ttctcttctctttcctctctccc

SEQ ID NO: 23724 - DNA, 20 bp, Artificial Sequence
  ALK Forward Primer
tcctttgacctgactccctg

SEQ ID NO: 23725 - DNA, 20 bp, Artificial Sequence
  ALK Forward Primer
agcatttcctcaggcaaaaa

SEQ ID NO: 23726 - DNA, 20 bp, Artificial Sequence
  ALK Forward Primer
gaatacccgaggcatgtgat

SEQ ID NO: 23727 - DNA, 20 bp, Artificial Sequence
  ALK Forward Primer
cagagagaaaaggggctgag

SEQ ID NO: 23728 - DNA, 20 bp, Artificial Sequence
  ALK Forward Primer
aacaatggagcaacagcatt

SEQ ID NO: 23729 - DNA, 20 bp, Artificial Sequence
  ALK Forward Primer
tttctcacccaaaggacagg

SEQ ID NO: 23730 - DNA, 20 bp, Artificial Sequence
  ALK Forward Primer
gcaggatctgtgcagcaata

SEQ ID NO: 23731 - DNA, 22 bp, Artificial Sequence
  ALK Forward Primer
tcatttcctttggctagtttcc

SEQ ID NO: 23732 - DNA, 20 bp, Artificial Sequence
  ALK Forward Primer
cttctctgcccactttctgg

SEQ ID NO: 23733 - DNA, 20 bp, Artificial Sequence
  ALK Forward Primer
ctcacccacacgccttattt

SEQ ID NO: 23734 - DNA, 20 bp, Artificial Sequence
  ALK Forward Primer
ccagtagcccagtgcctcta

SEQ ID NO: 23735 - DNA, 20 bp, Artificial Sequence
  ALK Forward Primer
ttcaatcctcctttccatgc

SEQ ID NO: 23736 - DNA, 20 bp, Artificial Sequence
  ALK Forward Primer
cccctagagttgcagagtgc

SEQ ID NO: 23737 - DNA, 20 bp, Artificial Sequence
  ALK Forward Primer
gataaagctgggcctcaatg

SEQ ID NO: 23738 - DNA, 20 bp, Artificial Sequence
  ALK Forward Primer
aagcaaacatttgtcctgcc

SEQ ID NO: 23739 - DNA, 20 bp, Artificial Sequence
  ALK Forward Primer
tctcctcccatgccttacac

SEQ ID NO: 23740 - DNA, 20 bp, Artificial Sequence
  ALK Forward Primer
gatcgcaccccagagaaata

SEQ ID NO: 23741 - DNA, 20 bp, Artificial Sequence
  ALK Forward Primer
tgggccacgctaaataactc

SEQ ID NO: 23742 - DNA, 20 bp, Artificial Sequence
  ALK Forward Primer
gggagctccaatttcctctc

SEQ ID NO: 23743 - DNA, 20 bp, Artificial Sequence
  ALK Forward Primer
tgagtcatcatcccctagcc

SEQ ID NO: 23744 - DNA, 20 bp, Artificial Sequence
  ALK Forward Primer
aatgcaacggttttgctttc

SEQ ID NO: 23745 - DNA, 20 bp, Artificial Sequence
  ALK Forward Primer
gggaaaatgaacggaaccat

SEQ ID NO: 23746 - DNA, 20 bp, Artificial Sequence
  ALK Forward Primer
ggggagctcatccagttaca

SEQ ID NO: 23747 - DNA, 20 bp, Artificial Sequence
  ALK Forward Primer
cagccaatagcagagaagcc

SEQ ID NO: 23748 - DNA, 21 bp, Artificial Sequence
  ALK Forward Primer
gataaaaggtgatggggaagc

SEQ ID NO: 23749 - DNA, 20 bp, Artificial Sequence
  ALK Forward Primer
ggctcactttaggtgccagt

SEQ ID NO: 23750 - DNA, 20 bp, Artificial Sequence
  ALK Forward Primer
ctgggtttgcttgatggaat

SEQ ID NO: 23751 - DNA, 20 bp, Artificial Sequence
  ALK Forward Primer
ggcttcatagtgactcccca

SEQ ID NO: 23752 - DNA, 20 bp, Artificial Sequence
  ALK Forward Primer
aattttgtctcggacagcgt

SEQ ID NO: 23753 - DNA, 20 bp, Artificial Sequence
  ALK Forward Primer
aacactaaatcccggcacac

SEQ ID NO: 23754 - DNA, 19 bp, Artificial Sequence
  ALK Forward Primer
ctccagcaccaactgcttg

SEQ ID NO: 23755 - DNA, 20 bp, Artificial Sequence
  ALK Forward Primer
cacgaagtcaactgccagac

SEQ ID NO: 23756 - DNA, 20 bp, Artificial Sequence
  ALK Forward Primer
ggcgagcaggagtctaaatg

SEQ ID NO: 23757 - DNA, 20 bp, Artificial Sequence
  ALK Forward Primer
gcctccaatctctgcaactt

SEQ ID NO: 23758 - DNA, 19 bp, Artificial Sequence
  ALK Forward Primer
agtttgcagcgtccttgct

SEQ ID NO: 23759 - DNA, 18 bp, Artificial Sequence
  ALK Forward Primer
ctcgatcggctcctatgc

SEQ ID NO: 23760 - DNA, 20 bp, Artificial Sequence
  ALK Reverse Primer
tgactaagcatggggaaaga

SEQ ID NO: 23761 - DNA, 20 bp, Artificial Sequence
  ALK Reverse Primer
tggaggagagagaggcaatg

SEQ ID NO: 23762 - DNA, 20 bp, Artificial Sequence
  ALK Reverse Primer
actgtcccacctaacgttgc

SEQ ID NO: 23763 - DNA, 20 bp, Artificial Sequence
  ALK Reverse Primer
tgtaatcaacaccgctttgc

SEQ ID NO: 23764 - DNA, 23 bp, Artificial Sequence
  ALK Reverse Primer
cacttccattatagcgcttatcc

SEQ ID NO: 23765 - DNA, 20 bp, Artificial Sequence
  ALK Reverse Primer
gtgtctcctctcctcctccc

SEQ ID NO: 23766 - DNA, 21 bp, Artificial Sequence
  ALK Reverse Primer
tcgaacactcgtgtttttctg

SEQ ID NO: 23767 - DNA, 25 bp, Artificial Sequence
  ALK Reverse Primer
cacgttattgaaggttctttcagag

SEQ ID NO: 23768 - DNA, 20 bp, Artificial Sequence
  ALK Reverse Primer
ctatgcttcctccctcacca

SEQ ID NO: 23769 - DNA, 22 bp, Artificial Sequence
  ALK Reverse Primer
tcaggaggattaagggaatgaa

SEQ ID NO: 23770 - DNA, 20 bp, Artificial Sequence
  ALK Reverse Primer
gtgtctccatttgcccattt

SEQ ID NO: 23771 - DNA, 20 bp, Artificial Sequence
  ALK Reverse Primer
cgcactcttccttgaccaat

SEQ ID NO: 23772 - DNA, 20 bp, Artificial Sequence
  ALK Reverse Primer
tacaggctgtggactcacca

SEQ ID NO: 23773 - DNA, 20 bp, Artificial Sequence
  ALK Reverse Primer
tggagtttgtcaccagtgga

SEQ ID NO: 23774 - DNA, 20 bp, Artificial Sequence
  ALK Reverse Primer
gctggctggacatcctaatc

SEQ ID NO: 23775 - DNA, 21 bp, Artificial Sequence
  ALK Reverse Primer
cgtgagtcaatgggtaaggag

SEQ ID NO: 23776 - DNA, 24 bp, Artificial Sequence
  ALK Reverse Primer
tttgtcaaaaagctgatcattagg

SEQ ID NO: 23777 - DNA, 23 bp, Artificial Sequence
  ALK Reverse Primer
ttgtttgcaaatatgaaaatcct

SEQ ID NO: 23778 - DNA, 20 bp, Artificial Sequence
  ALK Reverse Primer
agggatgggtcagaacacag

SEQ ID NO: 23779 - DNA, 20 bp, Artificial Sequence
  ALK Reverse Primer
ggaggtggggtctttctgtc

SEQ ID NO: 23780 - DNA, 25 bp, Artificial Sequence
  ALK Reverse Primer
tgtggtttacttacatcatggaaaa

SEQ ID NO: 23781 - DNA, 20 bp, Artificial Sequence
  ALK Reverse Primer
ttgcaaccataaatggagga

SEQ ID NO: 23782 - DNA, 20 bp, Artificial Sequence
  ALK Reverse Primer
ggttggttggttggttttgt

SEQ ID NO: 23783 - DNA, 20 bp, Artificial Sequence
  ALK Reverse Primer
ctgccagttaagtggatgcc

SEQ ID NO: 23784 - DNA, 20 bp, Artificial Sequence
  ALK Reverse Primer
caagccctgctctcagttct

SEQ ID NO: 23785 - DNA, 20 bp, Artificial Sequence
  ALK Reverse Primer
acacaggagaacaccaggct

SEQ ID NO: 23786 - DNA, 20 bp, Artificial Sequence
  ALK Reverse Primer
catcagtgcccttctgtgaa

SEQ ID NO: 23787 - DNA, 20 bp, Artificial Sequence
  ALK Reverse Primer
ctatccgtcgcactcctctc

SEQ ID NO: 23788 - DNA, 20 bp, Artificial Sequence
  ALK Reverse Primer
agctcagcaagtccctcctt

SEQ ID NO: 23789 - DNA, 20 bp, Artificial Sequence
  ALK Reverse Primer
tgtaatctggccatgctctg

SEQ ID NO: 23790 - DNA, 20 bp, Artificial Sequence
  ALK Reverse Primer
aatcctagtgatggccgttg

SEQ ID NO: 23791 - DNA, 20 bp, Artificial Sequence
  ALK Reverse Primer
tgcctaaggccagatagcat

SEQ ID NO: 23792 - DNA, 20 bp, Artificial Sequence
  ALK Reverse Primer
catcccagacttcttctggc

SEQ ID NO: 23793 - DNA, 22 bp, Artificial Sequence
  ALK Reverse Primer
catgaatctcctacctgaaccc

SEQ ID NO: 23794 - DNA, 20 bp, Artificial Sequence
  ALK Reverse Primer
ctgcatttaccttcttgcca

SEQ ID NO: 23795 - DNA, 20 bp, Artificial Sequence
  ALK Reverse Primer
aactgtccttctggggcaat

SEQ ID NO: 23796 - DNA, 21 bp, Artificial Sequence
  ALK Reverse Primer
tcctttcctacagccacaaga

SEQ ID NO: 23797 - DNA, 20 bp, Artificial Sequence
  ALK Reverse Primer
ccttttgaagtcgtccttgg

SEQ ID NO: 23798 - DNA, 20 bp, Artificial Sequence
  ALK Reverse Primer
tcagttctccctccagcttc

SEQ ID NO: 23799 - DNA, 20 bp, Artificial Sequence
  ALK Reverse Primer
cagatcatcaggctctttgc

SEQ ID NO: 23800 - DNA, 20 bp, Artificial Sequence
  ALK Reverse Primer
tttttgacaatgggtggctt

SEQ ID NO: 23801 - DNA, 20 bp, Artificial Sequence
  ALK Reverse Primer
ccccttcagctttgtctttg

SEQ ID NO: 23802 - DNA, 20 bp, Artificial Sequence
  ALK Reverse Primer
ccctcctctcactgacaagc

SEQ ID NO: 23803 - DNA, 20 bp, Artificial Sequence
  ALK Reverse Primer
ggaaagaacacctgctccaa

SEQ ID NO: 23804 - DNA, 20 bp, Artificial Sequence
  ALK Reverse Primer
gctcataattgcccagcatt

SEQ ID NO: 23805 - DNA, 20 bp, Artificial Sequence
  ALK Reverse Primer
aacactcactgaacccccag

SEQ ID NO: 23806 - DNA, 20 bp, Artificial Sequence
  ALK Reverse Primer
gtgggcacctcaggactaaa

SEQ ID NO: 23807 - DNA, 20 bp, Artificial Sequence
  ALK Reverse Primer
tccctacctaccacacagca

SEQ ID NO: 23808 - DNA, 20 bp, Artificial Sequence
  ALK Reverse Primer
gtgtgcattgggcactgtag

SEQ ID NO: 23809 - DNA, 20 bp, Artificial Sequence
  ALK Reverse Primer
tgtggaaacccctcaatacc

SEQ ID NO: 23810 - DNA, 20 bp, Artificial Sequence
  ALK Reverse Primer
atggccatgagaagaacagc

SEQ ID NO: 23811 - DNA, 20 bp, Artificial Sequence
  ALK Reverse Primer
acagcctagcccgtgagtta

SEQ ID NO: 23812 - DNA, 20 bp, Artificial Sequence
  ALK Reverse Primer
acgcggtagacagagtggat

SEQ ID NO: 23813 - DNA, 20 bp, Artificial Sequence
  ALK Reverse Primer
agggatggagaaacatgtgc

SEQ ID NO: 23814 - DNA, 20 bp, Artificial Sequence
  ALK Reverse Primer
ccaatctgctctttcaaccc

SEQ ID NO: 23815 - DNA, 20 bp, Artificial Sequence
  ALK Reverse Primer
aggcatcagattcactggct

SEQ ID NO: 23816 - DNA, 20 bp, Artificial Sequence
  ALK Reverse Primer
ggcatcctcctcagaccttt

SEQ ID NO: 23817 - DNA, 20 bp, Artificial Sequence
  ALK Reverse Primer
gggactcaaagtggtgatgg

SEQ ID NO: 23818 - DNA, 20 bp, Artificial Sequence
  ALK Reverse Primer
ttaaacatagcaccctgggc

SEQ ID NO: 23819 - DNA, 20 bp, Artificial Sequence
  ALK Reverse Primer
actcaagcaactgacctggg

SEQ ID NO: 23820 - DNA, 20 bp, Artificial Sequence
  ALK Reverse Primer
ctctgcagcaaattcaacca

SEQ ID NO: 23821 - DNA, 20 bp, Artificial Sequence
  ALK Reverse Primer
ccactctcctgcaaatggaa

SEQ ID NO: 23822 - DNA, 20 bp, Artificial Sequence
  ALK Reverse Primer
ccttttgctggctctgtttc

SEQ ID NO: 23823 - DNA, 24 bp, Artificial Sequence
  ALK Reverse Primer
cctgattatgaataaaacttggca

SEQ ID NO: 23824 - DNA, 20 bp, Artificial Sequence
  ALK Reverse Primer
tctcagtgcctatggctcct

SEQ ID NO: 23825 - DNA, 20 bp, Artificial Sequence
  ALK Reverse Primer
ccctgctgttatccactggt

SEQ ID NO: 23826 - DNA, 19 bp, Artificial Sequence
  ALK Reverse Primer
gacaccctcaccccaactc

SEQ ID NO: 23827 - DNA, 20 bp, Artificial Sequence
  ALK Reverse Primer
aggtgtatgaaggccaggtg

SEQ ID NO: 23828 - DNA, 20 bp, Artificial Sequence
  ALK Reverse Primer
atactccccagccagtaccc

SEQ ID NO: 23829 - DNA, 21 bp, Artificial Sequence
  ALK Reverse Primer
aggacaagccttgacattcag

SEQ ID NO: 23830 - DNA, 20 bp, Artificial Sequence
  ALK Reverse Primer
gcagagccctgagtacaagc

SEQ ID NO: 23831 - DNA, 20 bp, Artificial Sequence
  ALK Reverse Primer
tgggtctaatcccatctcca

SEQ ID NO: 23832 - DNA, 20 bp, Artificial Sequence
  ALK Reverse Primer
gagtggcagtggttagggaa

SEQ ID NO: 23833 - DNA, 20 bp, Artificial Sequence
  ALK Reverse Primer
ccctaatctgatcacggtcg

SEQ ID NO: 23834 - DNA, 20 bp, Artificial Sequence
  ALK Reverse Primer
gagacatgcccaggacagat

SEQ ID NO: 23835 - DNA, 20 bp, Artificial Sequence
  ALK Reverse Primer
tctagctcccacatgcttcc

SEQ ID NO: 23836 - DNA, 20 bp, Artificial Sequence
  ALK Reverse Primer
aggtgccaaggtgtcacttc

SEQ ID NO: 23837 - DNA, 20 bp, Artificial Sequence
  ALK Reverse Primer
cgccactgatattcatccct

SEQ ID NO: 23838 - DNA, 20 bp, Artificial Sequence
  ALK Reverse Primer
gtgtccagtaccaagcacga

SEQ ID NO: 23839 - DNA, 20 bp, Artificial Sequence
  ALK Reverse Primer
gtgtgaaaggtgggtcatgg

SEQ ID NO: 23840 - DNA, 20 bp, Artificial Sequence
  ALK Reverse Primer
cctgaaagccacaaggtcat

SEQ ID NO: 23841 - DNA, 20 bp, Artificial Sequence
  ALK Reverse Primer
ccaccactgactcaaaagca

SEQ ID NO: 23842 - DNA, 20 bp, Artificial Sequence
  ALK Reverse Primer
cccaccaagctaaaacctca

SEQ ID NO: 23843 - DNA, 20 bp, Artificial Sequence
  ALK Reverse Primer
agtgaccccctaactttggc

SEQ ID NO: 23844 - DNA, 18 bp, Artificial Sequence
  ALK Reverse Primer
agtcctgggagaggcacc

SEQ ID NO: 23845 - DNA, 20 bp, Artificial Sequence
  ALK Reverse Primer
tgcattgacgctgtgtgtaa

SEQ ID NO: 23846 - DNA, 20 bp, Artificial Sequence
  ALK Reverse Primer
tcttgatgtcccccaaagtc

SEQ ID NO: 23847 - DNA, 20 bp, Artificial Sequence
  ALK Reverse Primer
ggaggtggctggaatgataa

SEQ ID NO: 23848 - DNA, 20 bp, Artificial Sequence
  ALK Reverse Primer
aggaacgagtttagtcgcca

SEQ ID NO: 23849 - DNA, 20 bp, Artificial Sequence
  ALK Reverse Primer
agccacaggtgaggaaacac

SEQ ID NO: 23850 - DNA, 20 bp, Artificial Sequence
  ALK Reverse Primer
ctttgttgccagggtatcgt

SEQ ID NO: 23851 - DNA, 20 bp, Artificial Sequence
  ALK Reverse Primer
acaaacccaagctcaacacc

SEQ ID NO: 23852 - DNA, 20 bp, Artificial Sequence
  ALK Reverse Primer
ttccacacatttgctcgaag

SEQ ID NO: 23853 - DNA, 20 bp, Artificial Sequence
  ALK Reverse Primer
tcctagacccccatggtaca

SEQ ID NO: 23854 - DNA, 20 bp, Artificial Sequence
  ALK Reverse Primer
gcctgagggcatcttagtca

SEQ ID NO: 23855 - DNA, 20 bp, Artificial Sequence
  ALK Reverse Primer
accactgagaggtcaccagg

SEQ ID NO: 23856 - DNA, 20 bp, Artificial Sequence
  ALK Reverse Primer
tcagagccagagacccctaa

SEQ ID NO: 23857 - DNA, 20 bp, Artificial Sequence
  ALK Reverse Primer
tctgtctgtccaggaaaggg

SEQ ID NO: 23858 - DNA, 20 bp, Artificial Sequence
  ALK Reverse Primer
gccacaaacctaacgtgctt

SEQ ID NO: 23859 - DNA, 20 bp, Artificial Sequence
  ALK Reverse Primer
agggctcactctacaaggca

SEQ ID NO: 23860 - DNA, 20 bp, Artificial Sequence
  ALK Reverse Primer
gcatcgatggaaatgtgatg

SEQ ID NO: 23861 - DNA, 20 bp, Artificial Sequence
  ALK Reverse Primer
aaagaacccagattggaccc

SEQ ID NO: 23862 - DNA, 20 bp, Artificial Sequence
  ALK Reverse Primer
gacaggccgctagagttcag

SEQ ID NO: 23863 - DNA, 20 bp, Artificial Sequence
  ALK Reverse Primer
gggaagggtcaagacaatga

SEQ ID NO: 23864 - DNA, 20 bp, Artificial Sequence
  ALK Reverse Primer
atgcacaggaagttcccaag

SEQ ID NO: 23865 - DNA, 20 bp, Artificial Sequence
  ALK Reverse Primer
aggagctgaggaagcatgaa

SEQ ID NO: 23866 - DNA, 20 bp, Artificial Sequence
  ALK Reverse Primer
tagcaggaactcagcaccct

SEQ ID NO: 23867 - DNA, 20 bp, Artificial Sequence
  ALK Reverse Primer
ggaacctccttgtttccaga

SEQ ID NO: 23868 - DNA, 20 bp, Artificial Sequence
  ALK Reverse Primer
agacatgccgctcttctgat

SEQ ID NO: 23869 - DNA, 20 bp, Artificial Sequence
  ALK Reverse Primer
atgttcgcaaacagcctctg

SEQ ID NO: 23870 - DNA, 20 bp, Artificial Sequence
  ALK Reverse Primer
ccactttgcctcctcaacat

SEQ ID NO: 23871 - DNA, 19 bp, Artificial Sequence
  ALK Reverse Primer
acaaccacctgtcgcaatc

SEQ ID NO: 23872 - DNA, 20 bp, Artificial Sequence
  ALK Reverse Primer
cacattggaggatgctggta

SEQ ID NO: 23873 - DNA, 20 bp, Artificial Sequence
  ALK Reverse Primer
gccttcctttttctcagcct

SEQ ID NO: 23874 - DNA, 20 bp, Artificial Sequence
  ALK Reverse Primer
cggggtgagaaaaatagcaa

SEQ ID NO: 23875 - DNA, 20 bp, Artificial Sequence
  ALK Reverse Primer
ttgccaagctctgctgtcta

SEQ ID NO: 23876 - DNA, 20 bp, Artificial Sequence
  ALK Reverse Primer
cattcaagcccttgcttttc

SEQ ID NO: 23877 - DNA, 20 bp, Artificial Sequence
  ALK Reverse Primer
cccacttgagtggcaggtat

SEQ ID NO: 23878 - DNA, 20 bp, Artificial Sequence
  ALK Reverse Primer
cacaccagctgtgctctcat

SEQ ID NO: 23879 - DNA, 20 bp, Artificial Sequence
  ALK Reverse Primer
ctgatgcaacaggagtggaa

SEQ ID NO: 23880 - DNA, 20 bp, Artificial Sequence
  ALK Reverse Primer
cgctataaagggcacagacc

SEQ ID NO: 23881 - DNA, 20 bp, Artificial Sequence
  ALK Reverse Primer
gttgggggactcagtgagag

SEQ ID NO: 23882 - DNA, 20 bp, Artificial Sequence
  ALK Reverse Primer
actgaggaagcgaggacaaa

SEQ ID NO: 23883 - DNA, 20 bp, Artificial Sequence
  ALK Reverse Primer
gaagtgagagaaacggcctg

SEQ ID NO: 23884 - DNA, 20 bp, Artificial Sequence
  ALK Reverse Primer
tcagctgagcttgtgaatgg

SEQ ID NO: 23885 - DNA, 20 bp, Artificial Sequence
  ALK Reverse Primer
aggttcctgggcttcattct

SEQ ID NO: 23886 - DNA, 20 bp, Artificial Sequence
  ALK Reverse Primer
ctccactgacttctctgccc

SEQ ID NO: 23887 - DNA, 20 bp, Artificial Sequence
  ALK Reverse Primer
accacttcaaaatgtcccca

SEQ ID NO: 23888 - DNA, 20 bp, Artificial Sequence
  ALK Reverse Primer
tcccagccaaaatcagaaag

SEQ ID NO: 23889 - DNA, 20 bp, Artificial Sequence
  ALK Reverse Primer
agtgtttccaagaacacgcc

SEQ ID NO: 23890 - DNA, 20 bp, Artificial Sequence
  ALK Reverse Primer
ttgaatggggattctcttgg

SEQ ID NO: 23891 - DNA, 20 bp, Artificial Sequence
  ALK Reverse Primer
tggaagcctctggaaatgag

SEQ ID NO: 23892 - DNA, 20 bp, Artificial Sequence
  ALK Reverse Primer
ggtgttcccatgtttccaag

SEQ ID NO: 23893 - DNA, 20 bp, Artificial Sequence
  ALK Reverse Primer
tagctgctacagtgcccaca

SEQ ID NO: 23894 - DNA, 20 bp, Artificial Sequence
  ALK Reverse Primer
caataggaaatgagctcgcc

SEQ ID NO: 23895 - DNA, 20 bp, Artificial Sequence
  ALK Reverse Primer
actgttctggaacgctcctc

SEQ ID NO: 23896 - DNA, 20 bp, Artificial Sequence
  ALK Reverse Primer
aaggttggagatggggagat

SEQ ID NO: 23897 - DNA, 20 bp, Artificial Sequence
  ALK Reverse Primer
gactgcctctcctcttgtgc

SEQ ID NO: 23898 - DNA, 20 bp, Artificial Sequence
  ALK Reverse Primer
tttgggagcaggttagttgc

SEQ ID NO: 23899 - DNA, 20 bp, Artificial Sequence
  ALK Reverse Primer
ctctgttgcttggagagcct

SEQ ID NO: 23900 - DNA, 21 bp, Artificial Sequence
  ALK Reverse Primer
ttagcaaaattatgcatgccc

SEQ ID NO: 23901 - DNA, 20 bp, Artificial Sequence
  ALK Reverse Primer
cttgggtacaggcaggagtc

SEQ ID NO: 23902 - DNA, 20 bp, Artificial Sequence
  ALK Reverse Primer
tgtgattgataaggccaccc

SEQ ID NO: 23903 - DNA, 19 bp, Artificial Sequence
  ALK Reverse Primer
gccagcagagacatccaga

SEQ ID NO: 23904 - DNA, 20 bp, Artificial Sequence
  ALK Reverse Primer
ttggatatctgcttcccaca

SEQ ID NO: 23905 - DNA, 20 bp, Artificial Sequence
  ALK Reverse Primer
catgggtctgacacaggatg

SEQ ID NO: 23906 - DNA, 20 bp, Artificial Sequence
  ALK Reverse Primer
gaacaaagggaaccagcaga

SEQ ID NO: 23907 - DNA, 20 bp, Artificial Sequence
  ALK Reverse Primer
ctccacctggacaatgaggt

SEQ ID NO: 23908 - DNA, 20 bp, Artificial Sequence
  ALK Reverse Primer
gaagcaagagcctacccctt

SEQ ID NO: 23909 - DNA, 20 bp, Artificial Sequence
  ALK Reverse Primer
tttcctgcatgtgtgaaagc

SEQ ID NO: 23910 - DNA, 22 bp, Artificial Sequence
  ALK Reverse Primer
aaaaacactcaaaagtgttccc

SEQ ID NO: 23911 - DNA, 20 bp, Artificial Sequence
  ALK Reverse Primer
gacacctttgatcctgcaca

SEQ ID NO: 23912 - DNA, 20 bp, Artificial Sequence
  ALK Reverse Primer
ttgtctgctcagcatcaagc

SEQ ID NO: 23913 - DNA, 22 bp, Artificial Sequence
  ALK Reverse Primer
tgttttcagtatggggtatgtg

SEQ ID NO: 23914 - DNA, 20 bp, Artificial Sequence
  ALK Reverse Primer
tccaaactgaggcagatcct

SEQ ID NO: 23915 - DNA, 23 bp, Artificial Sequence
  ALK Reverse Primer
tggttctaagcattgagctttgt

SEQ ID NO: 23916 - DNA, 25 bp, Artificial Sequence
  ALK Reverse Primer
atgtacaaacagttaattggccagc

SEQ ID NO: 23917 - DNA, 20 bp, Artificial Sequence
  ALK Reverse Primer
ccaacccagtagcaaaaagc

SEQ ID NO: 23918 - DNA, 20 bp, Artificial Sequence
  ALK Reverse Primer
ccagtgacccctctctaagg

SEQ ID NO: 23919 - DNA, 22 bp, Artificial Sequence
  ALK Reverse Primer
cgtgcttattggatgagtcaga

SEQ ID NO: 23920 - DNA, 20 bp, Artificial Sequence
  ALK Reverse Primer
aaacaggcctgagaacagga

SEQ ID NO: 23921 - DNA, 20 bp, Artificial Sequence
  ALK Reverse Primer
agggcagtgatggtggtaac

SEQ ID NO: 23922 - DNA, 20 bp, Artificial Sequence
  ALK Reverse Primer
gacatgctgcagtaccgaga

SEQ ID NO: 23923 - DNA, 20 bp, Artificial Sequence
  ALK Reverse Primer
gatgtgcccctcctcactta

SEQ ID NO: 23924 - DNA, 20 bp, Artificial Sequence
  ALK Reverse Primer
tacagcagccatcacaggag

SEQ ID NO: 23925 - DNA, 20 bp, Artificial Sequence
  ALK Reverse Primer
tatgcgtaacctgcagatgg

SEQ ID NO: 23926 - DNA, 20 bp, Artificial Sequence
  ALK Reverse Primer
acctccgtctgctcatctgt

SEQ ID NO: 23927 - DNA, 20 bp, Artificial Sequence
  ALK Reverse Primer
gcatcccttcccttcttttc

SEQ ID NO: 23928 - DNA, 20 bp, Artificial Sequence
  ALK Reverse Primer
gacggtgaagtgcactgaga

SEQ ID NO: 23929 - DNA, 20 bp, Artificial Sequence
  ALK Reverse Primer
gttttaggccctggacacaa

SEQ ID NO: 23930 - DNA, 20 bp, Artificial Sequence
  ALK Reverse Primer
catgtatgagtgtgggctgg

SEQ ID NO: 23931 - DNA, 20 bp, Artificial Sequence
  ALK Reverse Primer
cactcacccctcatgtgttg

SEQ ID NO: 23932 - DNA, 20 bp, Artificial Sequence
  ALK Reverse Primer
ctgcctgtagtggcttctcc

SEQ ID NO: 23933 - DNA, 20 bp, Artificial Sequence
  ALK Reverse Primer
cctggaggtggacagtgaat

SEQ ID NO: 23934 - DNA, 20 bp, Artificial Sequence
  ALK Reverse Primer
agcagcagacaggaaccatt

SEQ ID NO: 23935 - DNA, 20 bp, Artificial Sequence
  ALK Reverse Primer
cttgccctagatggtgcatt

SEQ ID NO: 23936 - DNA, 20 bp, Artificial Sequence
  ALK Reverse Primer
ttccactcgggagattcaac

SEQ ID NO: 23937 - DNA, 20 bp, Artificial Sequence
  ALK Reverse Primer
gagccatcattttcttccca

SEQ ID NO: 23938 - DNA, 20 bp, Artificial Sequence
  ALK Reverse Primer
tccatctgaacacagggtga

SEQ ID NO: 23939 - DNA, 20 bp, Artificial Sequence
  ALK Reverse Primer
gtgctccaggaagagaggtg

SEQ ID NO: 23940 - DNA, 20 bp, Artificial Sequence
  ALK Reverse Primer
ctgccctgctgattaacctc

SEQ ID NO: 23941 - DNA, 21 bp, Artificial Sequence
  ALK Reverse Primer
cagagcacatctgcatcttca

SEQ ID NO: 23942 - DNA, 20 bp, Artificial Sequence
  ALK Reverse Primer
aatcatcagcatctgggtcc

SEQ ID NO: 23943 - DNA, 20 bp, Artificial Sequence
  ALK Reverse Primer
tagccacagctcatcattgc

SEQ ID NO: 23944 - DNA, 20 bp, Artificial Sequence
  ALK Reverse Primer
cctcagaccctgtctttcca

SEQ ID NO: 23945 - DNA, 20 bp, Artificial Sequence
  ALK Reverse Primer
tgctaatgtgcccagaagtg

SEQ ID NO: 23946 - DNA, 20 bp, Artificial Sequence
  ALK Reverse Primer
aagagagaacacccccactg

SEQ ID NO: 23947 - DNA, 20 bp, Artificial Sequence
  ALK Reverse Primer
cccttcctcaacctccctac

SEQ ID NO: 23948 - DNA, 20 bp, Artificial Sequence
  ALK Reverse Primer
acattcctcactccccacag

SEQ ID NO: 23949 - DNA, 20 bp, Artificial Sequence
  ALK Reverse Primer
tggaaaagagcagggaagag

SEQ ID NO: 23950 - DNA, 20 bp, Artificial Sequence
  ALK Reverse Primer
atagagcgtggtcccatagc

SEQ ID NO: 23951 - DNA, 20 bp, Artificial Sequence
  ALK Reverse Primer
ggccacacccagtcagtaat

SEQ ID NO: 23952 - DNA, 20 bp, Artificial Sequence
  ALK Reverse Primer
ttaggaaacagccatccacc

SEQ ID NO: 23953 - DNA, 20 bp, Artificial Sequence
  ALK Reverse Primer
cccagtgattcacctccact

SEQ ID NO: 23954 - DNA, 20 bp, Artificial Sequence
  ALK Reverse Primer
tcctgattcctgcctgatct

SEQ ID NO: 23955 - DNA, 20 bp, Artificial Sequence
  ALK Reverse Primer
ggcctgtgaggtgtcttctg

SEQ ID NO: 23956 - DNA, 20 bp, Artificial Sequence
  ALK Reverse Primer
tcctttcaacacagttcccc

SEQ ID NO: 23957 - DNA, 20 bp, Artificial Sequence
  ALK Reverse Primer
gagcaaaggaaacctctgga

SEQ ID NO: 23958 - DNA, 20 bp, Artificial Sequence
  ALK Reverse Primer
caaacaaggagctgaaaccc

SEQ ID NO: 23959 - DNA, 20 bp, Artificial Sequence
  ALK Reverse Primer
tgtgtacaggttctggctgc

SEQ ID NO: 23960 - DNA, 20 bp, Artificial Sequence
  ALK Reverse Primer
tcttcccatttccaagcatc

SEQ ID NO: 23961 - DNA, 20 bp, Artificial Sequence
  ALK Reverse Primer
aattgggaaattgaggggtc

SEQ ID NO: 23962 - DNA, 20 bp, Artificial Sequence
  ALK Reverse Primer
ggccctccaaggatatgaaa

SEQ ID NO: 23963 - DNA, 20 bp, Artificial Sequence
  ALK Reverse Primer
ggtgttttcatacccatgcc

SEQ ID NO: 23964 - DNA, 20 bp, Artificial Sequence
  ALK Reverse Primer
cctgctctggttttctgctc

SEQ ID NO: 23965 - DNA, 20 bp, Artificial Sequence
  ALK Reverse Primer
tctggccaggaataaccaag

SEQ ID NO: 23966 - DNA, 20 bp, Artificial Sequence
  ALK Reverse Primer
gccacggctacaacagattt

SEQ ID NO: 23967 - DNA, 20 bp, Artificial Sequence
  ALK Reverse Primer
ctctcagaggcatacacccc

SEQ ID NO: 23968 - DNA, 20 bp, Artificial Sequence
  ALK Reverse Primer
ccctgcattcaaaaccaact

SEQ ID NO: 23969 - DNA, 20 bp, Artificial Sequence
  ALK Reverse Primer
ttgatcttgccactgtcctg

SEQ ID NO: 23970 - DNA, 20 bp, Artificial Sequence
  ALK Reverse Primer
tttcctaagggttgcacctg

SEQ ID NO: 23971 - DNA, 20 bp, Artificial Sequence
  ALK Reverse Primer
agctcagcattgaaaccagg

SEQ ID NO: 23972 - DNA, 20 bp, Artificial Sequence
  ALK Reverse Primer
agaaaccattccagcctcag

SEQ ID NO: 23973 - DNA, 20 bp, Artificial Sequence
  ALK Reverse Primer
tccttcagcagctcaccttt

SEQ ID NO: 23974 - DNA, 20 bp, Artificial Sequence
  ALK Reverse Primer
gtgccagaagcaacctcttc

SEQ ID NO: 23975 - DNA, 20 bp, Artificial Sequence
  ALK Reverse Primer
acgcttcccttctccttgac

SEQ ID NO: 23976 - DNA, 20 bp, Artificial Sequence
  ALK Reverse Primer
acaagttccaaactccaccg

SEQ ID NO: 23977 - DNA, 20 bp, Artificial Sequence
  ALK Reverse Primer
ctgagtcgtacgtgagcagc

SEQ ID NO: 23978 - DNA, 20 bp, Artificial Sequence
  ALK Reverse Primer
gcttcatgacagcccatttt

SEQ ID NO: 23979 - DNA, 20 bp, Artificial Sequence
  ALK Reverse Primer
ccaagccagactcattgtga

SEQ ID NO: 23980 - DNA, 20 bp, Artificial Sequence
  ALK Reverse Primer
tttcctcatcaaaacccagg

SEQ ID NO: 23981 - DNA, 20 bp, Artificial Sequence
  ALK Reverse Primer
tagctccagacagccctcat

SEQ ID NO: 23982 - DNA, 20 bp, Artificial Sequence
  ALK Reverse Primer
acaaagggttccattgttgg

SEQ ID NO: 23983 - DNA, 20 bp, Artificial Sequence
  ALK Reverse Primer
cctagtgagagtttcgccca

SEQ ID NO: 23984 - DNA, 20 bp, Artificial Sequence
  ALK Reverse Primer
catccacagcttggcttaca

SEQ ID NO: 23985 - DNA, 20 bp, Artificial Sequence
  ALK Reverse Primer
aggatctggccctgtttctt

SEQ ID NO: 23986 - DNA, 20 bp, Artificial Sequence
  ALK Reverse Primer
ctgcaggttccaacagatca

SEQ ID NO: 23987 - DNA, 20 bp, Artificial Sequence
  ALK Reverse Primer
ttttctttcagagccccaga

SEQ ID NO: 23988 - DNA, 21 bp, Artificial Sequence
  ALK Reverse Primer
ggctgaaatcaattccaggtt

SEQ ID NO: 23989 - DNA, 20 bp, Artificial Sequence
  ALK Reverse Primer
ttgcaatgcaccatgtttct

SEQ ID NO: 23990 - DNA, 22 bp, Artificial Sequence
  ALK Reverse Primer
tctttgaaacatggcctaaatg

SEQ ID NO: 23991 - DNA, 20 bp, Artificial Sequence
  ALK Reverse Primer
caaggaccaagttcacccat

SEQ ID NO: 23992 - DNA, 20 bp, Artificial Sequence
  ALK Reverse Primer
tccagagagggatatgggtg

SEQ ID NO: 23993 - DNA, 20 bp, Artificial Sequence
  ALK Reverse Primer
cacccttttccaaacaccat

SEQ ID NO: 23994 - DNA, 20 bp, Artificial Sequence
  ALK Reverse Primer
acttcaagtgcacaccatgc

SEQ ID NO: 23995 - DNA, 20 bp, Artificial Sequence
  ALK Reverse Primer
agcaatgactaccaccccag

SEQ ID NO: 23996 - DNA, 20 bp, Artificial Sequence
  ALK Reverse Primer
gcccagaggggtttaagaac

SEQ ID NO: 23997 - DNA, 20 bp, Artificial Sequence
  ALK Reverse Primer
ggaggagcagacatcactcg

SEQ ID NO: 23998 - DNA, 20 bp, Artificial Sequence
  ALK Reverse Primer
aacaaatcgccctttcattg

SEQ ID NO: 23999 - DNA, 20 bp, Artificial Sequence
  ALK Reverse Primer
tcatcctagcaattcccacc

SEQ ID NO: 24000 - DNA, 20 bp, Artificial Sequence
  ALK Reverse Primer
ggtaagcctcagtttgcagg

SEQ ID NO: 24001 - DNA, 20 bp, Artificial Sequence
  ALK Reverse Primer
gtggtgtgtttcaccaatgc

SEQ ID NO: 24002 - DNA, 20 bp, Artificial Sequence
  ALK Reverse Primer
tggaaacaccatggatcaaa

SEQ ID NO: 24003 - DNA, 20 bp, Artificial Sequence
  ALK Reverse Primer
gatgttttgagcagtggcaa

SEQ ID NO: 24004 - DNA, 20 bp, Artificial Sequence
  ALK Reverse Primer
tgtcccatcagatgaaccaa

SEQ ID NO: 24005 - DNA, 22 bp, Artificial Sequence
  ALK Reverse Primer
caaggtagggattgtgtgtgtc

SEQ ID NO: 24006 - DNA, 20 bp, Artificial Sequence
  ALK Reverse Primer
tttggaaatccttctgtggc

SEQ ID NO: 24007 - DNA, 20 bp, Artificial Sequence
  ALK Reverse Primer
ggcttcagctattcagcacc

SEQ ID NO: 24008 - DNA, 20 bp, Artificial Sequence
  ALK Reverse Primer
atctccccacctaatggctc

SEQ ID NO: 24009 - DNA, 27 bp, Artificial Sequence
  ALK Reverse Primer
gaaatgactattgaaagagtctacaca

SEQ ID NO: 24010 - DNA, 20 bp, Artificial Sequence
  ALK Reverse Primer
gagcctgcataccactgaca

SEQ ID NO: 24011 - DNA, 20 bp, Artificial Sequence
  ALK Reverse Primer
gagaacaggagggtggtgaa

SEQ ID NO: 24012 - DNA, 20 bp, Artificial Sequence
  ALK Reverse Primer
gcctctgcctgagactccta

SEQ ID NO: 24013 - DNA, 20 bp, Artificial Sequence
  ALK Reverse Primer
gagcaggaaccatggagtgt

SEQ ID NO: 24014 - DNA, 20 bp, Artificial Sequence
  ALK Reverse Primer
acaactcacatttcccccaa

SEQ ID NO: 24015 - DNA, 20 bp, Artificial Sequence
  ALK Reverse Primer
aaaggggacctttcagcaat

SEQ ID NO: 24016 - DNA, 21 bp, Artificial Sequence
  ALK Reverse Primer
caggcagaatcttgtgaaagg

SEQ ID NO: 24017 - DNA, 20 bp, Artificial Sequence
  ALK Reverse Primer
gatttttgtctggcctttgc

SEQ ID NO: 24018 - DNA, 23 bp, Artificial Sequence
  ALK Reverse Primer
aaacacaaagaccagaaaccttg

SEQ ID NO: 24019 - DNA, 21 bp, Artificial Sequence
  ALK Reverse Primer
tgccctggtgtgaccttatta

SEQ ID NO: 24020 - DNA, 20 bp, Artificial Sequence
  ALK Reverse Primer
agcaaaaggagaaagcatcg

SEQ ID NO: 24021 - DNA, 20 bp, Artificial Sequence
  ALK Reverse Primer
aaggactgggggagagaaaa

SEQ ID NO: 24022 - DNA, 20 bp, Artificial Sequence
  ALK Reverse Primer
aagagtggagagggagaggc

SEQ ID NO: 24023 - DNA, 21 bp, Artificial Sequence
  ALK Reverse Primer
ggccaaagtggtaaaaacagg

SEQ ID NO: 24024 - DNA, 20 bp, Artificial Sequence
  ALK Reverse Primer
agtcaacctccagcattttg

SEQ ID NO: 24025 - DNA, 20 bp, Artificial Sequence
  ALK Reverse Primer
agctagccagcccctagttc

SEQ ID NO: 24026 - DNA, 20 bp, Artificial Sequence
  ALK Reverse Primer
tccaccttcctccactcttg

SEQ ID NO: 24027 - DNA, 20 bp, Artificial Sequence
  ALK Reverse Primer
agaaagggtgtggtcagtgg

SEQ ID NO: 24028 - DNA, 20 bp, Artificial Sequence
  ALK Reverse Primer
ctggtgtaggggagtctgga

SEQ ID NO: 24029 - DNA, 21 bp, Artificial Sequence
  ALK Reverse Primer
tgaaggaattcatgaccaagg

SEQ ID NO: 24030 - DNA, 20 bp, Artificial Sequence
  ALK Reverse Primer
tagccaagtggctggaaagt

SEQ ID NO: 24031 - DNA, 20 bp, Artificial Sequence
  ALK Reverse Primer
aggaaggatcctggtggatt

SEQ ID NO: 24032 - DNA, 20 bp, Artificial Sequence
  ALK Reverse Primer
agctctgaacagttgggtcc

SEQ ID NO: 24033 - DNA, 21 bp, Artificial Sequence
  ALK Reverse Primer
gaggaggtaagtggttggctt

SEQ ID NO: 24034 - DNA, 20 bp, Artificial Sequence
  ALK Reverse Primer
ttttaaaatctgccgatgcc

SEQ ID NO: 24035 - DNA, 20 bp, Artificial Sequence
  ALK Reverse Primer
caagaaggcccttagctgac

SEQ ID NO: 24036 - DNA, 20 bp, Artificial Sequence
  ALK Reverse Primer
tgagcctgcagtctgctcta

SEQ ID NO: 24037 - DNA, 20 bp, Artificial Sequence
  ALK Reverse Primer
aaaaatggcccttgtgaaag

SEQ ID NO: 24038 - DNA, 20 bp, Artificial Sequence
  ALK Reverse Primer
ttgatcactgcaggcttttg

SEQ ID NO: 24039 - DNA, 20 bp, Artificial Sequence
  ALK Reverse Primer
aacagagactggatggggaa

SEQ ID NO: 24040 - DNA, 20 bp, Artificial Sequence
  ALK Reverse Primer
ctgtgctgggttgatttgtc

SEQ ID NO: 24041 - DNA, 20 bp, Artificial Sequence
  ALK Reverse Primer
agccagagatctcaaggtga

SEQ ID NO: 24042 - DNA, 21 bp, Artificial Sequence
  ALK Reverse Primer
tcagaatcctctctcaccacc

SEQ ID NO: 24043 - DNA, 20 bp, Artificial Sequence
  ALK Reverse Primer
cagggtactgttgaccccac

SEQ ID NO: 24044 - DNA, 20 bp, Artificial Sequence
  ALK Reverse Primer
ccaggatcacaccatgacag

SEQ ID NO: 24045 - DNA, 20 bp, Artificial Sequence
  ALK Reverse Primer
gcacagacttggttcccatt

SEQ ID NO: 24046 - DNA, 20 bp, Artificial Sequence
  ALK Reverse Primer
ctggagcccagcattctatc

SEQ ID NO: 24047 - DNA, 20 bp, Artificial Sequence
  ALK Reverse Primer
tgcataaattcagccactgc

SEQ ID NO: 24048 - DNA, 20 bp, Artificial Sequence
  ALK Reverse Primer
aagtcaccctgctagaggca

SEQ ID NO: 24049 - DNA, 20 bp, Artificial Sequence
  ALK Reverse Primer
cgaacaccctagctctttgc

SEQ ID NO: 24050 - DNA, 20 bp, Artificial Sequence
  ALK Reverse Primer
gggtccacagttaggtggtg

SEQ ID NO: 24051 - DNA, 20 bp, Artificial Sequence
  ALK Reverse Primer
gttctcgaggcattttccaa

SEQ ID NO: 24052 - DNA, 20 bp, Artificial Sequence
  ALK Reverse Primer
tgcattttgaagagcacctg

SEQ ID NO: 24053 - DNA, 20 bp, Artificial Sequence
  ALK Reverse Primer
actcaaggcagggaggaagt

SEQ ID NO: 24054 - DNA, 20 bp, Artificial Sequence
  ALK Reverse Primer
ctcctccaatctgccaaaag

SEQ ID NO: 24055 - DNA, 20 bp, Artificial Sequence
  ALK Reverse Primer
ctccaaggagcctgaatctg

SEQ ID NO: 24056 - DNA, 21 bp, Artificial Sequence
  ALK Reverse Primer
gaccttgagtatagcgaccca

SEQ ID NO: 24057 - DNA, 20 bp, Artificial Sequence
  ALK Reverse Primer
cctatcagaaagcacagggc

SEQ ID NO: 24058 - DNA, 20 bp, Artificial Sequence
  ALK Reverse Primer
tgcagtgacagaatgtgcct

SEQ ID NO: 24059 - DNA, 20 bp, Artificial Sequence
  ALK Reverse Primer
caagcaagcccctatcagag

SEQ ID NO: 24060 - DNA, 20 bp, Artificial Sequence
  ALK Reverse Primer
caaaagcatcagaactggca

SEQ ID NO: 24061 - DNA, 23 bp, Artificial Sequence
  ALK Reverse Primer
gagccaaagaagatgagcataac

SEQ ID NO: 24062 - DNA, 20 bp, Artificial Sequence
  ALK Reverse Primer
gcagcaggcaaataggactc

SEQ ID NO: 24063 - DNA, 20 bp, Artificial Sequence
  ALK Reverse Primer
tacatgggcctggagaaaag

SEQ ID NO: 24064 - DNA, 20 bp, Artificial Sequence
  ALK Reverse Primer
taattaaagttgccaccggg

SEQ ID NO: 24065 - DNA, 18 bp, Artificial Sequence
  ALK Reverse Primer
cactcccacctcctccct

SEQ ID NO: 24066 - DNA, 20 bp, Artificial Sequence
  ALK Reverse Primer
aattcattctgagcccatgc

SEQ ID NO: 24067 - DNA, 21 bp, Artificial Sequence
  ALK Reverse Primer
ggattcccagagaagaactgg

SEQ ID NO: 24068 - DNA, 20 bp, Artificial Sequence
  ALK Reverse Primer
atgtgaggttcactcagggc

SEQ ID NO: 24069 - DNA, 21 bp, Artificial Sequence
  ALK Reverse Primer
cacattcaggttttcagacca

SEQ ID NO: 24070 - DNA, 20 bp, Artificial Sequence
  ALK Reverse Primer
cgctgggtttaatatgagcc

SEQ ID NO: 24071 - DNA, 22 bp, Artificial Sequence
  ALK Reverse Primer
cctttttggaagaattctgagc

SEQ ID NO: 24072 - DNA, 20 bp, Artificial Sequence
  ALK Reverse Primer
aagcccctcgagtttctcat

SEQ ID NO: 24073 - DNA, 20 bp, Artificial Sequence
  ALK Reverse Primer
acacgtagtttgggtttggc

SEQ ID NO: 24074 - DNA, 20 bp, Artificial Sequence
  ALK Reverse Primer
aacctcttggggcttcagtt

SEQ ID NO: 24075 - DNA, 20 bp, Artificial Sequence
  ALK Reverse Primer
tttccatggcataacaaggg

SEQ ID NO: 24076 - DNA, 21 bp, Artificial Sequence
  ALK Reverse Primer
tgtgaggcaagtctccttgtt

SEQ ID NO: 24077 - DNA, 20 bp, Artificial Sequence
  ALK Reverse Primer
aggtgggctttcttctccat

SEQ ID NO: 24078 - DNA, 20 bp, Artificial Sequence
  ALK Reverse Primer
aggcagagccatgcttagaa

SEQ ID NO: 24079 - DNA, 20 bp, Artificial Sequence
  ALK Reverse Primer
ctgtccccagtcacacaatg

SEQ ID NO: 24080 - DNA, 21 bp, Artificial Sequence
  ALK Reverse Primer
cccatagcaaataagcatcca

SEQ ID NO: 24081 - DNA, 20 bp, Artificial Sequence
  ALK Reverse Primer
ggtgggaaggtctctctcct

SEQ ID NO: 24082 - DNA, 20 bp, Artificial Sequence
  ALK Reverse Primer
ccctacctcacccctgattt

SEQ ID NO: 24083 - DNA, 20 bp, Artificial Sequence
  ALK Reverse Primer
accttgggctttcgagtgat

SEQ ID NO: 24084 - DNA, 20 bp, Artificial Sequence
  ALK Reverse Primer
actgtcaccccacactcctc

SEQ ID NO: 24085 - DNA, 20 bp, Artificial Sequence
  ALK Reverse Primer
aaactgtaaaccagcacggg

SEQ ID NO: 24086 - DNA, 20 bp, Artificial Sequence
  ALK Reverse Primer
ccatatctcagtggcttggg

SEQ ID NO: 24087 - DNA, 20 bp, Artificial Sequence
  ALK Reverse Primer
tgctcagagtgagctggaga

SEQ ID NO: 24088 - DNA, 20 bp, Artificial Sequence
  ALK Reverse Primer
tctgcctctgtgtgaaatgc

SEQ ID NO: 24089 - DNA, 20 bp, Artificial Sequence
  ALK Reverse Primer
agcaggaagtggtgaggcta

SEQ ID NO: 24090 - DNA, 20 bp, Artificial Sequence
  ALK Reverse Primer
gtggctttcttctgtccagc

SEQ ID NO: 24091 - DNA, 20 bp, Artificial Sequence
  ALK Reverse Primer
cagcaattggccttagtggt

SEQ ID NO: 24092 - DNA, 20 bp, Artificial Sequence
  ALK Reverse Primer
cacgcaggaaggaaaagaag

SEQ ID NO: 24093 - DNA, 20 bp, Artificial Sequence
  ALK Reverse Primer
tcatctgtgtgctggggata

SEQ ID NO: 24094 - DNA, 20 bp, Artificial Sequence
  ALK Reverse Primer
gtactctcggtcccctctcc

SEQ ID NO: 24095 - DNA, 20 bp, Artificial Sequence
  ALK Reverse Primer
ggaaggggaaagtaggttgc

SEQ ID NO: 24096 - DNA, 20 bp, Artificial Sequence
  ALK Reverse Primer
gagccacactcaaaccactg

SEQ ID NO: 24097 - DNA, 20 bp, Artificial Sequence
  ALK Reverse Primer
acaacagcaacaacaccagc

SEQ ID NO: 24098 - DNA, 20 bp, Artificial Sequence
  ALK Reverse Primer
acatttgaaaagcggctctg

SEQ ID NO: 24099 - DNA, 20 bp, Artificial Sequence
  ALK Reverse Primer
attgggaaaatgaaggcaca

SEQ ID NO: 24100 - DNA, 20 bp, Artificial Sequence
  ALK Reverse Primer
gtcatctggaccctttgtgg

SEQ ID NO: 24101 - DNA, 20 bp, Artificial Sequence
  ALK Reverse Primer
acctacaggcagctggaaaa

SEQ ID NO: 24102 - DNA, 20 bp, Artificial Sequence
  ALK Reverse Primer
gtgggtggtttgagtctggt

SEQ ID NO: 24103 - DNA, 20 bp, Artificial Sequence
  ALK Reverse Primer
gactcctctcatggcaaagc

SEQ ID NO: 24104 - DNA, 20 bp, Artificial Sequence
  ALK Reverse Primer
tgcagatgtctcaatcaggc

SEQ ID NO: 24105 - DNA, 20 bp, Artificial Sequence
  ALK Reverse Primer
tggtagaacctggggtcaag

SEQ ID NO: 24106 - DNA, 20 bp, Artificial Sequence
  ALK Reverse Primer
ccttccccctctggataaaa

SEQ ID NO: 24107 - DNA, 20 bp, Artificial Sequence
  ALK Reverse Primer
gcaccagctatgaccaggat

SEQ ID NO: 24108 - DNA, 20 bp, Artificial Sequence
  ALK Reverse Primer
tagtttcctcacagggccag

SEQ ID NO: 24109 - DNA, 20 bp, Artificial Sequence
  ALK Reverse Primer
atttgcagagaatgcccagt

SEQ ID NO: 24110 - DNA, 20 bp, Artificial Sequence
  ALK Reverse Primer
ggcattcatgaaccctccta

SEQ ID NO: 24111 - DNA, 20 bp, Artificial Sequence
  ALK Reverse Primer
tgcttccaccctcatagtcc

SEQ ID NO: 24112 - DNA, 20 bp, Artificial Sequence
  ALK Reverse Primer
tttgttgtgcattttcctgc

SEQ ID NO: 24113 - DNA, 20 bp, Artificial Sequence
  ALK Reverse Primer
tgcagaaaggcgttttacct

SEQ ID NO: 24114 - DNA, 20 bp, Artificial Sequence
  ALK Reverse Primer
gaaagaggggcaaagaggac

SEQ ID NO: 24115 - DNA, 20 bp, Artificial Sequence
  ALK Reverse Primer
gggattctgggcattttctt

SEQ ID NO: 24116 - DNA, 21 bp, Artificial Sequence
  ALK Reverse Primer
aacagactagcagcccaatca

SEQ ID NO: 24117 - DNA, 20 bp, Artificial Sequence
  ALK Reverse Primer
agctggatgaggaagtcagg

SEQ ID NO: 24118 - DNA, 20 bp, Artificial Sequence
  ALK Reverse Primer
atccagggcatcagagagtg

SEQ ID NO: 24119 - DNA, 20 bp, Artificial Sequence
  ALK Reverse Primer
gcaggccagaacaatcattt

SEQ ID NO: 24120 - DNA, 20 bp, Artificial Sequence
  ALK Reverse Primer
tgttagtctgggggaagtgc

SEQ ID NO: 24121 - DNA, 20 bp, Artificial Sequence
  ALK Reverse Primer
cggatcatctcaccaggtct

SEQ ID NO: 24122 - DNA, 20 bp, Artificial Sequence
  ALK Reverse Primer
ttccaggatgcaagtgacag

SEQ ID NO: 24123 - DNA, 20 bp, Artificial Sequence
  ALK Reverse Primer
aggcaagagcaagcaggtag

SEQ ID NO: 24124 - DNA, 20 bp, Artificial Sequence
  ALK Reverse Primer
actggtctctgccaggctta

SEQ ID NO: 24125 - DNA, 20 bp, Artificial Sequence
  ALK Reverse Primer
ggcaccagaggttctcagac

SEQ ID NO: 24126 - DNA, 20 bp, Artificial Sequence
  ALK Reverse Primer
tgtcagcattcaccccacta

SEQ ID NO: 24127 - DNA, 20 bp, Artificial Sequence
  ALK Reverse Primer
tgactctggtggtgaggtga

SEQ ID NO: 24128 - DNA, 20 bp, Artificial Sequence
  ALK Reverse Primer
caaggcacagccaaaggtat

SEQ ID NO: 24129 - DNA, 20 bp, Artificial Sequence
  ALK Reverse Primer
tgaaatggagactggggaag

SEQ ID NO: 24130 - DNA, 20 bp, Artificial Sequence
  ALK Reverse Primer
tctctccatccattcttccg

SEQ ID NO: 24131 - DNA, 20 bp, Artificial Sequence
  ALK Reverse Primer
tacaggaatcttggcggttc

SEQ ID NO: 24132 - DNA, 20 bp, Artificial Sequence
  ALK Reverse Primer
gcagggagattaatggcaaa

SEQ ID NO: 24133 - DNA, 19 bp, Artificial Sequence
  ALK Reverse Primer
atgagccctccttcccttt

SEQ ID NO: 24134 - DNA, 20 bp, Artificial Sequence
  ALK Reverse Primer
atcagtggtgagggtggaag

SEQ ID NO: 24135 - DNA, 20 bp, Artificial Sequence
  ALK Reverse Primer
cccaggtgctaggtgttgtt

SEQ ID NO: 24136 - DNA, 20 bp, Artificial Sequence
  ALK Reverse Primer
tttcatcagcttcccagtcc

SEQ ID NO: 24137 - DNA, 20 bp, Artificial Sequence
  ALK Reverse Primer
ttatccttcctgcctgccta

SEQ ID NO: 24138 - DNA, 20 bp, Artificial Sequence
  ALK Reverse Primer
tgagctgagagtctccccat

SEQ ID NO: 24139 - DNA, 20 bp, Artificial Sequence
  ALK Reverse Primer
acctgtgggcatgaatgttt

SEQ ID NO: 24140 - DNA, 20 bp, Artificial Sequence
  ALK Reverse Primer
gtccaagcagtcatgagcct

SEQ ID NO: 24141 - DNA, 20 bp, Artificial Sequence
  ALK Reverse Primer
tgtctgctgccttgaaaatg

SEQ ID NO: 24142 - DNA, 20 bp, Artificial Sequence
  ALK Reverse Primer
ggctggacactccttctctg

SEQ ID NO: 24143 - DNA, 20 bp, Artificial Sequence
  ALK Reverse Primer
cctgtctgtggggatgttgt

SEQ ID NO: 24144 - DNA, 22 bp, Artificial Sequence
  ALK Reverse Primer
agcattcataatcctctccctt

SEQ ID NO: 24145 - DNA, 20 bp, Artificial Sequence
  ALK Reverse Primer
catgaaagggcttggaagag

SEQ ID NO: 24146 - DNA, 20 bp, Artificial Sequence
  ALK Reverse Primer
agagatgccaacagcttggt

SEQ ID NO: 24147 - DNA, 20 bp, Artificial Sequence
  ALK Reverse Primer
tggaatgaagacccaggaag

SEQ ID NO: 24148 - DNA, 20 bp, Artificial Sequence
  ALK Reverse Primer
taccacccatgtgaccttga

SEQ ID NO: 24149 - DNA, 20 bp, Artificial Sequence
  ALK Reverse Primer
ctcagagtatgagccctgcc

SEQ ID NO: 24150 - DNA, 20 bp, Artificial Sequence
  ALK Reverse Primer
gaaagagctagatcggcagc

SEQ ID NO: 24151 - DNA, 20 bp, Artificial Sequence
  ALK Reverse Primer
agccctgttgtccttgaaga

SEQ ID NO: 24152 - DNA, 20 bp, Artificial Sequence
  ALK Reverse Primer
cttaatgagctgagcccctg

SEQ ID NO: 24153 - DNA, 20 bp, Artificial Sequence
  ALK Reverse Primer
cagaatgtgagctgccttca

SEQ ID NO: 24154 - DNA, 20 bp, Artificial Sequence
  ALK Reverse Primer
ctactgtcttccctgagccg

SEQ ID NO: 24155 - DNA, 20 bp, Artificial Sequence
  ALK Reverse Primer
atgcactctgatttccccac

SEQ ID NO: 24156 - DNA, 20 bp, Artificial Sequence
  ALK Reverse Primer
tgcctatgagctgtcacctg

SEQ ID NO: 24157 - DNA, 20 bp, Artificial Sequence
  ALK Reverse Primer
tcagtgattcctgccttgtg

SEQ ID NO: 24158 - DNA, 20 bp, Artificial Sequence
  ALK Reverse Primer
tgtggcttccatcttatccc

SEQ ID NO: 24159 - DNA, 20 bp, Artificial Sequence
  ALK Reverse Primer
ccctgagagccaacagaaac

SEQ ID NO: 24160 - DNA, 20 bp, Artificial Sequence
  ALK Reverse Primer
aggaggagtgagcatgcagt

SEQ ID NO: 24161 - DNA, 20 bp, Artificial Sequence
  ALK Reverse Primer
aggagtctgggtctgcctct

SEQ ID NO: 24162 - DNA, 20 bp, Artificial Sequence
  ALK Reverse Primer
tactccttatgacggggcag

SEQ ID NO: 24163 - DNA, 20 bp, Artificial Sequence
  ALK Reverse Primer
gcatttctgcctgtcctctc

SEQ ID NO: 24164 - DNA, 20 bp, Artificial Sequence
  ALK Reverse Primer
gcctaggtgtcttgggacaa

SEQ ID NO: 24165 - DNA, 23 bp, Artificial Sequence
  ALK Reverse Primer
ttccagagatgagtcttctgttt

SEQ ID NO: 24166 - DNA, 20 bp, Artificial Sequence
  ALK Reverse Primer
tgaaacctcaacacactgcc

SEQ ID NO: 24167 - DNA, 20 bp, Artificial Sequence
  ALK Reverse Primer
tgtgcttaaggaccaaaggc

SEQ ID NO: 24168 - DNA, 20 bp, Artificial Sequence
  ALK Reverse Primer
ggacaggaaacagccacagt

SEQ ID NO: 24169 - DNA, 20 bp, Artificial Sequence
  ALK Reverse Primer
agatccaccccaggatcatt

SEQ ID NO: 24170 - DNA, 20 bp, Artificial Sequence
  ALK Reverse Primer
gcggagaagggtacactcag

SEQ ID NO: 24171 - DNA, 19 bp, Artificial Sequence
  ALK Reverse Primer
acaagagccctgctgtgtg

SEQ ID NO: 24172 - DNA, 20 bp, Artificial Sequence
  ALK Reverse Primer
tcagttggatgggaaaaagc

SEQ ID NO: 24173 - DNA, 20 bp, Artificial Sequence
  ALK Reverse Primer
gtgtctgcattgtcaccact

SEQ ID NO: 24174 - DNA, 20 bp, Artificial Sequence
  ALK Reverse Primer
gtttgccatgactgctgaga

SEQ ID NO: 24175 - DNA, 20 bp, Artificial Sequence
  ALK Reverse Primer
ctacctcctgcaaggtcagc

SEQ ID NO: 24176 - DNA, 20 bp, Artificial Sequence
  ALK Reverse Primer
gactctggttctgcaagctg

SEQ ID NO: 24177 - DNA, 21 bp, Artificial Sequence
  ALK Reverse Primer
ggcccaatcactaacactctg

SEQ ID NO: 24178 - DNA, 20 bp, Artificial Sequence
  ALK Reverse Primer
agcatgtgattccaaatggg

SEQ ID NO: 24179 - DNA, 20 bp, Artificial Sequence
  ALK Reverse Primer
tgtgtgggagacaatctgga

SEQ ID NO: 24180 - DNA, 20 bp, Artificial Sequence
  ALK Reverse Primer
ttgggagcctttatgaatcg

SEQ ID NO: 24181 - DNA, 20 bp, Artificial Sequence
  ALK Reverse Primer
acgtcatggtctggatgtga

SEQ ID NO: 24182 - DNA, 20 bp, Artificial Sequence
  ALK Reverse Primer
cacagagctgtacacgggaa

SEQ ID NO: 24183 - DNA, 20 bp, Artificial Sequence
  ALK Reverse Primer
gagggtccaatccaaagtga

SEQ ID NO: 24184 - DNA, 20 bp, Artificial Sequence
  ALK Reverse Primer
caattggtttatgccccatc

SEQ ID NO: 24185 - DNA, 20 bp, Artificial Sequence
  ALK Reverse Primer
ccagccttacaacttgggaa

SEQ ID NO: 24186 - DNA, 20 bp, Artificial Sequence
  ALK Reverse Primer
tccacttcttgtctgacccc

SEQ ID NO: 24187 - DNA, 20 bp, Artificial Sequence
  ALK Reverse Primer
gaggtgaatgagacgcagtg

SEQ ID NO: 24188 - DNA, 20 bp, Artificial Sequence
  ALK Reverse Primer
agccatacagtcctggccta

SEQ ID NO: 24189 - DNA, 22 bp, Artificial Sequence
  ALK Reverse Primer
tgaagagatggctgagtctgaa

SEQ ID NO: 24190 - DNA, 20 bp, Artificial Sequence
  ALK Reverse Primer
aggaactgtgaggttgggtg

SEQ ID NO: 24191 - DNA, 20 bp, Artificial Sequence
  ALK Reverse Primer
aagtgtgccagggtcttctg

SEQ ID NO: 24192 - DNA, 20 bp, Artificial Sequence
  ALK Reverse Primer
tctacaaggatggcctcacc

SEQ ID NO: 24193 - DNA, 20 bp, Artificial Sequence
  ALK Reverse Primer
tccaccgaactcaacctctc

SEQ ID NO: 24194 - DNA, 20 bp, Artificial Sequence
  ALK Reverse Primer
gccctaatcccatctgttca

SEQ ID NO: 24195 - DNA, 21 bp, Artificial Sequence
  ALK Reverse Primer
caccaaattatctcctggcaa

SEQ ID NO: 24196 - DNA, 21 bp, Artificial Sequence
  ALK Reverse Primer
gctcattgtagtgccacatcc

SEQ ID NO: 24197 - DNA, 25 bp, Artificial Sequence
  ALK Reverse Primer
tggttccagatattcaaagtttagc

SEQ ID NO: 24198 - DNA, 20 bp, Artificial Sequence
  ALK Reverse Primer
acacaggtcatctggttccc

SEQ ID NO: 24199 - DNA, 20 bp, Artificial Sequence
  ALK Reverse Primer
tccatgttggtctctggtca

SEQ ID NO: 24200 - DNA, 21 bp, Artificial Sequence
  ALK Reverse Primer
gctctttggaaaacccatttc

SEQ ID NO: 24201 - DNA, 20 bp, Artificial Sequence
  ALK Reverse Primer
ggcacatactggatgcacac

SEQ ID NO: 24202 - DNA, 20 bp, Artificial Sequence
  ALK Reverse Primer
ttgtcttccttcctccctca

SEQ ID NO: 24203 - DNA, 20 bp, Artificial Sequence
  ALK Reverse Primer
tctagattctcccctgccaa

SEQ ID NO: 24204 - DNA, 20 bp, Artificial Sequence
  ALK Reverse Primer
tcaaagcctgggacaaaatg

SEQ ID NO: 24205 - DNA, 20 bp, Artificial Sequence
  ALK Reverse Primer
aaggaagtcacacagccacc

SEQ ID NO: 24206 - DNA, 20 bp, Artificial Sequence
  ALK Reverse Primer
actggtctgtccatttcccc

SEQ ID NO: 24207 - DNA, 20 bp, Artificial Sequence
  ALK Reverse Primer
actaggcttttgccagggtt

SEQ ID NO: 24208 - DNA, 20 bp, Artificial Sequence
  ALK Reverse Primer
cctaaagaggacctcagggg

SEQ ID NO: 24209 - DNA, 20 bp, Artificial Sequence
  ALK Reverse Primer
tgtggcctttttctccattc

SEQ ID NO: 24210 - DNA, 20 bp, Artificial Sequence
  ALK Reverse Primer
agtgtatgaaggtggggtgc

SEQ ID NO: 24211 - DNA, 20 bp, Artificial Sequence
  ALK Reverse Primer
aacattggctctggacaagg

SEQ ID NO: 24212 - DNA, 20 bp, Artificial Sequence
  ALK Reverse Primer
ccactaggatgcctttctgc

SEQ ID NO: 24213 - DNA, 20 bp, Artificial Sequence
  ALK Reverse Primer
agctcttagccagcatttcg

SEQ ID NO: 24214 - DNA, 20 bp, Artificial Sequence
  ALK Reverse Primer
acaccaggatctgtgggaag

SEQ ID NO: 24215 - DNA, 20 bp, Artificial Sequence
  ALK Reverse Primer
agaaccaaacccaccaaaca

SEQ ID NO: 24216 - DNA, 20 bp, Artificial Sequence
  ALK Reverse Primer
tcttctttgccatttgggac

SEQ ID NO: 24217 - DNA, 20 bp, Artificial Sequence
  ALK Reverse Primer
gctctcagcaccttaccctg

SEQ ID NO: 24218 - DNA, 20 bp, Artificial Sequence
  ALK Reverse Primer
gtgcctggaacctagtggaa

SEQ ID NO: 24219 - DNA, 20 bp, Artificial Sequence
  ALK Reverse Primer
ccatctccgtcttcctgaaa

SEQ ID NO: 24220 - DNA, 19 bp, Artificial Sequence
  ALK Reverse Primer
gccactctgcctgggtaat

SEQ ID NO: 24221 - DNA, 23 bp, Artificial Sequence
  ALK Reverse Primer
tcccagaagaaaattactttcaa

SEQ ID NO: 24222 - DNA, 20 bp, Artificial Sequence
  ALK Reverse Primer
gtgcctagctactgttggca

SEQ ID NO: 24223 - DNA, 20 bp, Artificial Sequence
  ALK Reverse Primer
gctgcttctcttgcctccta

SEQ ID NO: 24224 - DNA, 20 bp, Artificial Sequence
  ALK Reverse Primer
aacagatgttgcgtgcagag

SEQ ID NO: 24225 - DNA, 20 bp, Artificial Sequence
  ALK Reverse Primer
cacatctttcaaatcccagc

SEQ ID NO: 24226 - DNA, 20 bp, Artificial Sequence
  ALK Reverse Primer
tgcttggaagtgatcaccaa

SEQ ID NO: 24227 - DNA, 20 bp, Artificial Sequence
  ALK Reverse Primer
cgcctgaagcttttgagaac

SEQ ID NO: 24228 - DNA, 20 bp, Artificial Sequence
  ALK Reverse Primer
agctatccatccatccatgc

SEQ ID NO: 24229 - DNA, 20 bp, Artificial Sequence
  ALK Reverse Primer
tagcctgaaaggggacaaga

SEQ ID NO: 24230 - DNA, 20 bp, Artificial Sequence
  ALK Reverse Primer
cggcctcagctctcctatta

SEQ ID NO: 24231 - DNA, 20 bp, Artificial Sequence
  ALK Reverse Primer
ttgaaacacatgtccccaaa

SEQ ID NO: 24232 - DNA, 20 bp, Artificial Sequence
  ALK Reverse Primer
cacatctgaggtttcccagg

SEQ ID NO: 24233 - DNA, 20 bp, Artificial Sequence
  ALK Reverse Primer
atctgtctcccttgccatgt

SEQ ID NO: 24234 - DNA, 20 bp, Artificial Sequence
  ALK Reverse Primer
tgaaaggccagtgaaagagc

SEQ ID NO: 24235 - DNA, 22 bp, Artificial Sequence
  ALK Reverse Primer
cattttgggatcctaacttgaa

SEQ ID NO: 24236 - DNA, 20 bp, Artificial Sequence
  ALK Reverse Primer
gccaactggtctccctgata

SEQ ID NO: 24237 - DNA, 20 bp, Artificial Sequence
  ALK Reverse Primer
catctggagaaggctcaagg

SEQ ID NO: 24238 - DNA, 20 bp, Artificial Sequence
  ALK Reverse Primer
atgttttctggggtcattgc

SEQ ID NO: 24239 - DNA, 21 bp, Artificial Sequence
  ALK Reverse Primer
tggctctagctccaagaacag

SEQ ID NO: 24240 - DNA, 20 bp, Artificial Sequence
  ALK Reverse Primer
gagtctgttccagagacccg

SEQ ID NO: 24241 - DNA, 20 bp, Artificial Sequence
  ALK Reverse Primer
aacaagaatgtggcagggag

SEQ ID NO: 24242 - DNA, 20 bp, Artificial Sequence
  ALK Reverse Primer
ggggaaaagaaaaatcacca

SEQ ID NO: 24243 - DNA, 20 bp, Artificial Sequence
  ALK Reverse Primer
ctgaggcactcccagaccta

SEQ ID NO: 24244 - DNA, 20 bp, Artificial Sequence
  ALK Reverse Primer
gtgagtcctgaagtccctgc

SEQ ID NO: 24245 - DNA, 20 bp, Artificial Sequence
  ALK Reverse Primer
acctgagggttccgagactt

SEQ ID NO: 24246 - DNA, 20 bp, Artificial Sequence
  ALK Reverse Primer
ccaatcagtgacaggaggct

SEQ ID NO: 24247 - DNA, 20 bp, Artificial Sequence
  ALK Reverse Primer
gcagaaaagatttggtggga

SEQ ID NO: 24248 - DNA, 20 bp, Artificial Sequence
  ALK Reverse Primer
attgtggatggaaatcctgc

SEQ ID NO: 24249 - DNA, 21 bp, Artificial Sequence
  ALK Reverse Primer
gcagagagctatgattttggc

SEQ ID NO: 24250 - DNA, 20 bp, Artificial Sequence
  ALK Reverse Primer
gcttgcccttttctagtccc

SEQ ID NO: 24251 - DNA, 20 bp, Artificial Sequence
  ALK Reverse Primer
cacatggaaccagctgtacg

SEQ ID NO: 24252 - DNA, 20 bp, Artificial Sequence
  ALK Reverse Primer
tattcacaagccaaccctcc

SEQ ID NO: 24253 - DNA, 20 bp, Artificial Sequence
  ALK Reverse Primer
gtccattggagatttcaggg

SEQ ID NO: 24254 - DNA, 20 bp, Artificial Sequence
  ALK Reverse Primer
aaattgatgatgcctccagc

SEQ ID NO: 24255 - DNA, 19 bp, Artificial Sequence
  ALK Reverse Primer
ctcctgagtcacagctgcc

SEQ ID NO: 24256 - DNA, 20 bp, Artificial Sequence
  ALK Reverse Primer
tctaggccttgccttgctac

SEQ ID NO: 24257 - DNA, 20 bp, Artificial Sequence
  ALK Reverse Primer
taaacaaacgtgatggctgc

SEQ ID NO: 24258 - DNA, 20 bp, Artificial Sequence
  ALK Reverse Primer
gaatgcgactcaacaaatgc

SEQ ID NO: 24259 - DNA, 20 bp, Artificial Sequence
  ALK Reverse Primer
tcacaacccgtcctcaagat

SEQ ID NO: 24260 - DNA, 20 bp, Artificial Sequence
  ALK Reverse Primer
ggcattggagacatgtgatg

SEQ ID NO: 24261 - DNA, 20 bp, Artificial Sequence
  ALK Reverse Primer
gacctgcattggagagaaca

SEQ ID NO: 24262 - DNA, 21 bp, Artificial Sequence
  ALK Reverse Primer
agtcaccatccgaatgacttg

SEQ ID NO: 24263 - DNA, 20 bp, Artificial Sequence
  ALK Reverse Primer
cttcacacctcgtccagaca

SEQ ID NO: 24264 - DNA, 20 bp, Artificial Sequence
  ALK Reverse Primer
tgcaggctgatttaatggaa

SEQ ID NO: 24265 - DNA, 20 bp, Artificial Sequence
  ALK Reverse Primer
cccgtcacccacataacatc

SEQ ID NO: 24266 - DNA, 20 bp, Artificial Sequence
  ALK Reverse Primer
tgcaaactacatgcccacat

SEQ ID NO: 24267 - DNA, 20 bp, Artificial Sequence
  ALK Reverse Primer
ggttcacgttgcctcctagt

SEQ ID NO: 24268 - DNA, 20 bp, Artificial Sequence
  ALK Reverse Primer
tggcctggtacacagaatga

SEQ ID NO: 24269 - DNA, 20 bp, Artificial Sequence
  ALK Reverse Primer
tcctgatctttctgttgccc

SEQ ID NO: 24270 - DNA, 20 bp, Artificial Sequence
  ALK Reverse Primer
tctggcaagtttgtggagtg

SEQ ID NO: 24271 - DNA, 20 bp, Artificial Sequence
  ALK Reverse Primer
cttctccatggggatgatgt

SEQ ID NO: 24272 - DNA, 20 bp, Artificial Sequence
  ALK Reverse Primer
aggctgcctctctagggaac

SEQ ID NO: 24273 - DNA, 20 bp, Artificial Sequence
  ALK Reverse Primer
gtccccatcatgctaaggtg

SEQ ID NO: 24274 - DNA, 20 bp, Artificial Sequence
  ALK Reverse Primer
cttctcagacagggtttggc

SEQ ID NO: 24275 - DNA, 20 bp, Artificial Sequence
  ALK Reverse Primer
aaaggtgtgagcatgagcct

SEQ ID NO: 24276 - DNA, 20 bp, Artificial Sequence
  ALK Reverse Primer
gagggtttggggctttctta

SEQ ID NO: 24277 - DNA, 20 bp, Artificial Sequence
  ALK Reverse Primer
aacagtgggtgtccaggaag

SEQ ID NO: 24278 - DNA, 20 bp, Artificial Sequence
  ALK Reverse Primer
ttccatctttccagcctttg

SEQ ID NO: 24279 - DNA, 20 bp, Artificial Sequence
  ALK Reverse Primer
tcttgcagaccacagtctcg

SEQ ID NO: 24280 - DNA, 25 bp, Artificial Sequence
  ALK Reverse Primer
ccaaacctagaacaagataattcac

SEQ ID NO: 24281 - DNA, 20 bp, Artificial Sequence
  ALK Reverse Primer
cctgtagctcttcattccgc

SEQ ID NO: 24282 - DNA, 20 bp, Artificial Sequence
  ALK Reverse Primer
cacccatgtgaaaatgcaag

SEQ ID NO: 24283 - DNA, 20 bp, Artificial Sequence
  ALK Reverse Primer
aagcgagaagggtcactcaa

SEQ ID NO: 24284 - DNA, 20 bp, Artificial Sequence
  ALK Reverse Primer
ctgggaaaaggggacttcat

SEQ ID NO: 24285 - DNA, 20 bp, Artificial Sequence
  ALK Reverse Primer
actctcaccaccacctccac

SEQ ID NO: 24286 - DNA, 20 bp, Artificial Sequence
  ALK Reverse Primer
gctcactgaggcttgttttg

SEQ ID NO: 24287 - DNA, 20 bp, Artificial Sequence
  ALK Reverse Primer
tgaatacccaacccatgtca

SEQ ID NO: 24288 - DNA, 20 bp, Artificial Sequence
  ALK Reverse Primer
caactctaacctgcggttcc

SEQ ID NO: 24289 - DNA, 20 bp, Artificial Sequence
  ALK Reverse Primer
atctccagaccatcactcgg

SEQ ID NO: 24290 - DNA, 21 bp, Artificial Sequence
  ALK Reverse Primer
ttggtcatcagatttgaaggg

SEQ ID NO: 24291 - DNA, 20 bp, Artificial Sequence
  ALK Reverse Primer
aacaaccagctgctttgagc

SEQ ID NO: 24292 - DNA, 20 bp, Artificial Sequence
  ALK Reverse Primer
gatttaggcaacccactgga

SEQ ID NO: 24293 - DNA, 20 bp, Artificial Sequence
  ALK Reverse Primer
cctggcgcacactatactca

SEQ ID NO: 24294 - DNA, 20 bp, Artificial Sequence
  ALK Reverse Primer
gggaagacttgagtgctgct

SEQ ID NO: 24295 - DNA, 20 bp, Artificial Sequence
  ALK Reverse Primer
cttagcgaggaaaagtcccc

SEQ ID NO: 24296 - DNA, 20 bp, Artificial Sequence
  ALK Reverse Primer
agtggcaccttgatacctgg

SEQ ID NO: 24297 - DNA, 20 bp, Artificial Sequence
  ALK Reverse Primer
tctaaaccagccgaaatcca

SEQ ID NO: 24298 - DNA, 20 bp, Artificial Sequence
  ALK Reverse Primer
aaatgtcactctgggccttg

SEQ ID NO: 24299 - DNA, 20 bp, Artificial Sequence
  ALK Reverse Primer
agggttcctggaggaagaaa

SEQ ID NO: 24300 - DNA, 21 bp, Artificial Sequence
  ALK Reverse Primer
gcacctggccttgttttaact

SEQ ID NO: 24301 - DNA, 20 bp, Artificial Sequence
  ALK Reverse Primer
acctggcagaaaacatgctc

SEQ ID NO: 24302 - DNA, 20 bp, Artificial Sequence
  ALK Reverse Primer
ctgggacttcttggtttcca

SEQ ID NO: 24303 - DNA, 20 bp, Artificial Sequence
  ALK Reverse Primer
aattctcatctgcccattcc

SEQ ID NO: 24304 - DNA, 20 bp, Artificial Sequence
  ALK Reverse Primer
acggaaataaatcagcccct

SEQ ID NO: 24305 - DNA, 20 bp, Artificial Sequence
  ALK Reverse Primer
tttgagagtcctccccacag

SEQ ID NO: 24306 - DNA, 20 bp, Artificial Sequence
  ALK Reverse Primer
gaagaggatgaggcttgacg

SEQ ID NO: 24307 - DNA, 20 bp, Artificial Sequence
  ALK Reverse Primer
aagatgaacagccaacaggg

SEQ ID NO: 24308 - DNA, 20 bp, Artificial Sequence
  ALK Reverse Primer
aaggcaaagcagagggtttt

SEQ ID NO: 24309 - DNA, 20 bp, Artificial Sequence
  ALK Reverse Primer
ggtgccactcacacacaaac

SEQ ID NO: 24310 - DNA, 20 bp, Artificial Sequence
  ALK Reverse Primer
aaacctcccttcttgtgcag

SEQ ID NO: 24311 - DNA, 20 bp, Artificial Sequence
  ALK Reverse Primer
gcagcactgtgtggtcctaa

SEQ ID NO: 24312 - DNA, 20 bp, Artificial Sequence
  ALK Reverse Primer
ctgaagcctggcccttagat

SEQ ID NO: 24313 - DNA, 20 bp, Artificial Sequence
  ALK Reverse Primer
gccatatatgaggcaggcat

SEQ ID NO: 24314 - DNA, 20 bp, Artificial Sequence
  ALK Reverse Primer
gtgatctcgggcaagtcatt

SEQ ID NO: 24315 - DNA, 20 bp, Artificial Sequence
  ALK Reverse Primer
ggtaaatgcgttcgggtcta

SEQ ID NO: 24316 - DNA, 20 bp, Artificial Sequence
  ALK Reverse Primer
tttctagtcccaggatcccc

SEQ ID NO: 24317 - DNA, 20 bp, Artificial Sequence
  ALK Reverse Primer
ttcacagtcctctcacccct

SEQ ID NO: 24318 - DNA, 20 bp, Artificial Sequence
  ALK Reverse Primer
tgcgttcctcaaatgtgaat

SEQ ID NO: 24319 - DNA, 20 bp, Artificial Sequence
  ALK Reverse Primer
atacgatccactctgcctgc

SEQ ID NO: 24320 - DNA, 20 bp, Artificial Sequence
  ALK Reverse Primer
gagaggtcaagagccaccag

SEQ ID NO: 24321 - DNA, 20 bp, Artificial Sequence
  ALK Reverse Primer
tgctgctgactcaataacgg

SEQ ID NO: 24322 - DNA, 20 bp, Artificial Sequence
  ALK Reverse Primer
tggtgggagtagggagtcag

SEQ ID NO: 24323 - DNA, 20 bp, Artificial Sequence
  ALK Reverse Primer
gcctcactggagaggcttta

SEQ ID NO: 24324 - DNA, 20 bp, Artificial Sequence
  ALK Reverse Primer
ctggccaaggagactgtgtt

SEQ ID NO: 24325 - DNA, 20 bp, Artificial Sequence
  ALK Reverse Primer
tgccaaatgcttcctttctt

SEQ ID NO: 24326 - DNA, 19 bp, Artificial Sequence
  ALK Reverse Primer
ccctggcattgttgatgac

SEQ ID NO: 24327 - DNA, 20 bp, Artificial Sequence
  ALK Reverse Primer
ggctttggggtttcaatctt

SEQ ID NO: 24328 - DNA, 20 bp, Artificial Sequence
  ALK Reverse Primer
tagcttgtgctgctgcagtt

SEQ ID NO: 24329 - DNA, 20 bp, Artificial Sequence
  ALK Reverse Primer
ggatagaaagggaaagggga

SEQ ID NO: 24330 - DNA, 21 bp, Artificial Sequence
  ALK Reverse Primer
tgcaaaaagtcttccctttga

SEQ ID NO: 24331 - DNA, 21 bp, Artificial Sequence
  ALK Reverse Primer
aagctcttagggaccagaagc

SEQ ID NO: 24332 - DNA, 20 bp, Artificial Sequence
  ALK Reverse Primer
ctgcctggaggtctgtgaat

SEQ ID NO: 24333 - DNA, 20 bp, Artificial Sequence
  ALK Reverse Primer
aagggatccccaacttcttg

SEQ ID NO: 24334 - DNA, 20 bp, Artificial Sequence
  ALK Reverse Primer
ttgaggccactctttgaagg

SEQ ID NO: 24335 - DNA, 20 bp, Artificial Sequence
  ALK Reverse Primer
tgtcattctccagagggcat

SEQ ID NO: 24336 - DNA, 20 bp, Artificial Sequence
  ALK Reverse Primer
cctctttgtcctcaccttgc

SEQ ID NO: 24337 - DNA, 21 bp, Artificial Sequence
  ALK Reverse Primer
gggagatacaacctgagagca

SEQ ID NO: 24338 - DNA, 20 bp, Artificial Sequence
  ALK Reverse Primer
tgggcaaaaagaaaggtttg

SEQ ID NO: 24339 - DNA, 20 bp, Artificial Sequence
  ALK Reverse Primer
tttgtggaaccttttgggag

SEQ ID NO: 24340 - DNA, 20 bp, Artificial Sequence
  ALK Reverse Primer
gcttactcacccccacttca

SEQ ID NO: 24341 - DNA, 20 bp, Artificial Sequence
  ALK Reverse Primer
caaaagggcctgagaaacaa

SEQ ID NO: 24342 - DNA, 20 bp, Artificial Sequence
  ALK Reverse Primer
tgcccacttggagtgtatca

SEQ ID NO: 24343 - DNA, 20 bp, Artificial Sequence
  ALK Reverse Primer
acacattatggcaagccagg

SEQ ID NO: 24344 - DNA, 20 bp, Artificial Sequence
  ALK Reverse Primer
gagcctccattgaaagtggt

SEQ ID NO: 24345 - DNA, 20 bp, Artificial Sequence
  ALK Reverse Primer
tgcacctgcatgttcaaact

SEQ ID NO: 24346 - DNA, 20 bp, Artificial Sequence
  ALK Reverse Primer
aggtctgtctagctggctgc

SEQ ID NO: 24347 - DNA, 21 bp, Artificial Sequence
  ALK Reverse Primer
tgcctttttctttcatttcca

SEQ ID NO: 24348 - DNA, 20 bp, Artificial Sequence
  ALK Reverse Primer
gattaggaagcagggggttc

SEQ ID NO: 24349 - DNA, 20 bp, Artificial Sequence
  ALK Reverse Primer
aaaggggcttttctcaaagg

SEQ ID NO: 24350 - DNA, 20 bp, Artificial Sequence
  ALK Reverse Primer
cacagtgcacagatgttcca

SEQ ID NO: 24351 - DNA, 20 bp, Artificial Sequence
  ALK Reverse Primer
ccaccattagaaggcagcat

SEQ ID NO: 24352 - DNA, 23 bp, Artificial Sequence
  ALK Reverse Primer
cgtatgttcaaaccaacagattc

SEQ ID NO: 24353 - DNA, 20 bp, Artificial Sequence
  ALK Reverse Primer
caaccattggcagcaaatta

SEQ ID NO: 24354 - DNA, 20 bp, Artificial Sequence
  ALK Reverse Primer
ttttgaaatgacctggagcc

SEQ ID NO: 24355 - DNA, 20 bp, Artificial Sequence
  ALK Reverse Primer
atagcaccttccatcgcatt

SEQ ID NO: 24356 - DNA, 20 bp, Artificial Sequence
  ALK Reverse Primer
caggagtcaggaaaggcaag

SEQ ID NO: 24357 - DNA, 20 bp, Artificial Sequence
  ALK Reverse Primer
tgaggtacacagggagaccc

SEQ ID NO: 24358 - DNA, 20 bp, Artificial Sequence
  ALK Reverse Primer
ccatttctccaagccctaca

SEQ ID NO: 24359 - DNA, 20 bp, Artificial Sequence
  ALK Reverse Primer
cttctcacaatgggccagat

SEQ ID NO: 24360 - DNA, 20 bp, Artificial Sequence
  ALK Reverse Primer
ttcagtgcattctcccaaca

SEQ ID NO: 24361 - DNA, 20 bp, Artificial Sequence
  ALK Reverse Primer
acagtgcacttccctccatc

SEQ ID NO: 24362 - DNA, 20 bp, Artificial Sequence
  ALK Reverse Primer
gatctcctagtgcccagtcg

SEQ ID NO: 24363 - DNA, 20 bp, Artificial Sequence
  ALK Reverse Primer
aggacgccctcaaatgtcta

SEQ ID NO: 24364 - DNA, 20 bp, Artificial Sequence
  ALK Reverse Primer
tatgcccacaacctgtgaaa

SEQ ID NO: 24365 - DNA, 20 bp, Artificial Sequence
  ALK Reverse Primer
attccaatggcaatcacgtt

SEQ ID NO: 24366 - DNA, 20 bp, Artificial Sequence
  ALK Reverse Primer
agtgtgacctttggtttgcc

SEQ ID NO: 24367 - DNA, 20 bp, Artificial Sequence
  ALK Reverse Primer
ataacttggccttggcctct

SEQ ID NO: 24368 - DNA, 20 bp, Artificial Sequence
  ALK Reverse Primer
ccatgggacctttttcattg

SEQ ID NO: 24369 - DNA, 20 bp, Artificial Sequence
  ALK Reverse Primer
tcttcagacaccacactgcc

SEQ ID NO: 24370 - DNA, 20 bp, Artificial Sequence
  ALK Reverse Primer
gctccgacaacccagattta

SEQ ID NO: 24371 - DNA, 20 bp, Artificial Sequence
  ALK Reverse Primer
tttggccaccagatttttct

SEQ ID NO: 24372 - DNA, 20 bp, Artificial Sequence
  ALK Reverse Primer
caaggaggtccttaggggag

SEQ ID NO: 24373 - DNA, 20 bp, Artificial Sequence
  ALK Reverse Primer
ctctctgtccgcgtcttacc

SEQ ID NO: 24374 - DNA, 20 bp, Artificial Sequence
  ALK Reverse Primer
actgtggagagaaggatggg

SEQ ID NO: 24375 - DNA, 20 bp, Artificial Sequence
  ALK Reverse Primer
tttgccgaaaaactcacaca

SEQ ID NO: 24376 - DNA, 20 bp, Artificial Sequence
  ALK Reverse Primer
taagtctgtgggctgcagaa

SEQ ID NO: 24377 - DNA, 20 bp, Artificial Sequence
  ALK Reverse Primer
ttatttcccaacctgtgcaa

SEQ ID NO: 24378 - DNA, 20 bp, Artificial Sequence
  ALK Reverse Primer
gtgaccggtctggacacttt

SEQ ID NO: 24379 - DNA, 23 bp, Artificial Sequence
  ALK Reverse Primer
tgcaatactggatgaaatgagaa

SEQ ID NO: 24380 - DNA, 21 bp, Artificial Sequence
  ALK Reverse Primer
ccccagaggacattgtttagg

SEQ ID NO: 24381 - DNA, 20 bp, Artificial Sequence
  ALK Reverse Primer
gttgtgactgtcagagccca

SEQ ID NO: 24382 - DNA, 20 bp, Artificial Sequence
  ALK Reverse Primer
ttgcagacctttcctccaat

SEQ ID NO: 24383 - DNA, 20 bp, Artificial Sequence
  ALK Reverse Primer
cctactgtcaaggagggagc

SEQ ID NO: 24384 - DNA, 20 bp, Artificial Sequence
  ALK Reverse Primer
ccctctgaattggcatcatt

SEQ ID NO: 24385 - DNA, 20 bp, Artificial Sequence
  ALK Reverse Primer
tttccccaagtgctgatttc

SEQ ID NO: 24386 - DNA, 20 bp, Artificial Sequence
  ALK Reverse Primer
atggggcctaggaatctgtt

SEQ ID NO: 24387 - DNA, 20 bp, Artificial Sequence
  ALK Reverse Primer
gatggactgcagagaaaggg

SEQ ID NO: 24388 - DNA, 20 bp, Artificial Sequence
  ALK Reverse Primer
caaaagaggcttcctggaga

SEQ ID NO: 24389 - DNA, 20 bp, Artificial Sequence
  ALK Reverse Primer
catggcaataacgtccactg

SEQ ID NO: 24390 - DNA, 20 bp, Artificial Sequence
  ALK Reverse Primer
ggcaaagcatacaacagcaa

SEQ ID NO: 24391 - DNA, 21 bp, Artificial Sequence
  ALK Reverse Primer
ttctcctcacacttgctccat

SEQ ID NO: 24392 - DNA, 20 bp, Artificial Sequence
  ALK Reverse Primer
cccaggccttagactgtgac

SEQ ID NO: 24393 - DNA, 20 bp, Artificial Sequence
  ALK Reverse Primer
tgccacaccttgtgaaagag

SEQ ID NO: 24394 - DNA, 20 bp, Artificial Sequence
  ALK Reverse Primer
caggacagcagaagtctcca

SEQ ID NO: 24395 - DNA, 20 bp, Artificial Sequence
  ALK Reverse Primer
cctggggatattgtgcttgt

SEQ ID NO: 24396 - DNA, 20 bp, Artificial Sequence
  ALK Reverse Primer
ttggcctcaaacttatggct

SEQ ID NO: 24397 - DNA, 20 bp, Artificial Sequence
  ALK Reverse Primer
gcactgcaaatgatctggaa

SEQ ID NO: 24398 - DNA, 27 bp, Artificial Sequence
  ALK Reverse Primer
tctatatgtagatgtgacaggtttgaa

SEQ ID NO: 24399 - DNA, 20 bp, Artificial Sequence
  ALK Reverse Primer
cggtaagctttcacaaaggc

SEQ ID NO: 24400 - DNA, 20 bp, Artificial Sequence
  ALK Reverse Primer
caggctgtgtgtcccaagtt

SEQ ID NO: 24401 - DNA, 20 bp, Artificial Sequence
  ALK Reverse Primer
cctcaaatgaaagacagccc

SEQ ID NO: 24402 - DNA, 20 bp, Artificial Sequence
  ALK Reverse Primer
aacaccaaacaaaagggcag

SEQ ID NO: 24403 - DNA, 20 bp, Artificial Sequence
  ALK Reverse Primer
tccttagccaatcagttgcc

SEQ ID NO: 24404 - DNA, 21 bp, Artificial Sequence
  ALK Reverse Primer
tgatattgttggggacctcag

SEQ ID NO: 24405 - DNA, 20 bp, Artificial Sequence
  ALK Reverse Primer
gtgagatcaggagctcagcc

SEQ ID NO: 24406 - DNA, 22 bp, Artificial Sequence
  ALK Reverse Primer
tctttggttaacagcataaccc

SEQ ID NO: 24407 - DNA, 22 bp, Artificial Sequence
  ALK Reverse Primer
cacatgttaagagaagtgggca

SEQ ID NO: 24408 - DNA, 20 bp, Artificial Sequence
  ALK Reverse Primer
tgagagcaatccctgtagca

SEQ ID NO: 24409 - DNA, 20 bp, Artificial Sequence
  ALK Reverse Primer
ctggtactgctttccttgcc

SEQ ID NO: 24410 - DNA, 20 bp, Artificial Sequence
  ALK Reverse Primer
tgttggattttgatctggca

SEQ ID NO: 24411 - DNA, 20 bp, Artificial Sequence
  ALK Reverse Primer
ttggccccctgctttatatt

SEQ ID NO: 24412 - DNA, 20 bp, Artificial Sequence
  ALK Reverse Primer
ccttcccctcatttctgaca

SEQ ID NO: 24413 - DNA, 20 bp, Artificial Sequence
  ALK Reverse Primer
ccatgcctggcctactttta

SEQ ID NO: 24414 - DNA, 22 bp, Artificial Sequence
  ALK Reverse Primer
gatccagagaactgtcttgcag

SEQ ID NO: 24415 - DNA, 20 bp, Artificial Sequence
  ALK Reverse Primer
tcaaacaaggctcttggtcc

SEQ ID NO: 24416 - DNA, 20 bp, Artificial Sequence
  ALK Reverse Primer
gcagattccaagctctggtc

SEQ ID NO: 24417 - DNA, 20 bp, Artificial Sequence
  ALK Reverse Primer
gaagaccacctgccactttc

SEQ ID NO: 24418 - DNA, 20 bp, Artificial Sequence
  ALK Reverse Primer
gtggctgggaacttcaatgt

SEQ ID NO: 24419 - DNA, 20 bp, Artificial Sequence
  ALK Reverse Primer
tggctctgtttcctgtcctt

SEQ ID NO: 24420 - DNA, 20 bp, Artificial Sequence
  ALK Reverse Primer
tcctgaacaaggcaagaacc

SEQ ID NO: 24421 - DNA, 24 bp, Artificial Sequence
  ALK Reverse Primer
tttggaagaactcattgataaagc

SEQ ID NO: 24422 - DNA, 20 bp, Artificial Sequence
  ALK Reverse Primer
aagaagccatcttatgcccc

SEQ ID NO: 24423 - DNA, 20 bp, Artificial Sequence
  ALK Reverse Primer
tagagcacacaactttggcg

SEQ ID NO: 24424 - DNA, 20 bp, Artificial Sequence
  ALK Reverse Primer
tcaaagtgaacaccagtgcc

SEQ ID NO: 24425 - DNA, 20 bp, Artificial Sequence
  ALK Reverse Primer
tggagttgggaggagacatt

SEQ ID NO: 24426 - DNA, 20 bp, Artificial Sequence
  ALK Reverse Primer
tctagtgtggtctgggaggg

SEQ ID NO: 24427 - DNA, 20 bp, Artificial Sequence
  ALK Reverse Primer
tcccagagatgaatgagcct

SEQ ID NO: 24428 - DNA, 19 bp, Artificial Sequence
  ALK Reverse Primer
ctccctggcctgagtctct

SEQ ID NO: 24429 - DNA, 20 bp, Artificial Sequence
  ALK Reverse Primer
catccaggccagaaactagg

SEQ ID NO: 24430 - DNA, 20 bp, Artificial Sequence
  ALK Reverse Primer
cctgtgggtacacggagttt

SEQ ID NO: 24431 - DNA, 20 bp, Artificial Sequence
  ALK Reverse Primer
cccagggctcttttacacac

SEQ ID NO: 24432 - DNA, 20 bp, Artificial Sequence
  ALK Reverse Primer
tcagctcaactctccctcgt

SEQ ID NO: 24433 - DNA, 25 bp, Artificial Sequence
  ALK Reverse Primer
tgtggaatctcagaaagcttaagta

SEQ ID NO: 24434 - DNA, 20 bp, Artificial Sequence
  ALK Reverse Primer
ctgggaccaactctgggtta

SEQ ID NO: 24435 - DNA, 20 bp, Artificial Sequence
  ALK Reverse Primer
tcaacgtgttatctgctggc

SEQ ID NO: 24436 - DNA, 20 bp, Artificial Sequence
  ALK Reverse Primer
tgtcctccccctagagatga

SEQ ID NO: 24437 - DNA, 20 bp, Artificial Sequence
  ALK Reverse Primer
cagggtaagggagtcatgga

SEQ ID NO: 24438 - DNA, 20 bp, Artificial Sequence
  ALK Reverse Primer
cctaccattcccacaagctg

SEQ ID NO: 24439 - DNA, 20 bp, Artificial Sequence
  ALK Reverse Primer
gatgggagatgttcagggaa

SEQ ID NO: 24440 - DNA, 20 bp, Artificial Sequence
  ALK Reverse Primer
ttcaggcctgtgtgttcaag

SEQ ID NO: 24441 - DNA, 23 bp, Artificial Sequence
  ALK Reverse Primer
acatgaagaaaatgcaaacactt

SEQ ID NO: 24442 - DNA, 20 bp, Artificial Sequence
  ALK Reverse Primer
ttccacccctgagaagaatg

SEQ ID NO: 24443 - DNA, 20 bp, Artificial Sequence
  ALK Reverse Primer
ctaaagcctcgcctcatcct

SEQ ID NO: 24444 - DNA, 22 bp, Artificial Sequence
  ALK Reverse Primer
aacagacaatcacctaggacca

SEQ ID NO: 24445 - DNA, 20 bp, Artificial Sequence
  ALK Reverse Primer
caaaccaggattccaagtgc

SEQ ID NO: 24446 - DNA, 20 bp, Artificial Sequence
  ALK Reverse Primer
ggcctagggaagaagctttg

SEQ ID NO: 24447 - DNA, 20 bp, Artificial Sequence
  ALK Reverse Primer
tttgtgggaagaattgaggc

SEQ ID NO: 24448 - DNA, 20 bp, Artificial Sequence
  ALK Reverse Primer
ctctgcaagcccagagaaag

SEQ ID NO: 24449 - DNA, 20 bp, Artificial Sequence
  ALK Reverse Primer
tttccccctcagttctcctt

SEQ ID NO: 24450 - DNA, 20 bp, Artificial Sequence
  ALK Reverse Primer
ttttgctctcctacggcact

SEQ ID NO: 24451 - DNA, 20 bp, Artificial Sequence
  ALK Reverse Primer
acccaggtcatacagcttgc

SEQ ID NO: 24452 - DNA, 23 bp, Artificial Sequence
  ALK Reverse Primer
cctgtcattagcaacaacaacaa

SEQ ID NO: 24453 - DNA, 21 bp, Artificial Sequence
  ALK Reverse Primer
tcagaatgcagcagagagaga

SEQ ID NO: 24454 - DNA, 20 bp, Artificial Sequence
  ALK Reverse Primer
ctgccaagaaagaaagccaa

SEQ ID NO: 24455 - DNA, 20 bp, Artificial Sequence
  ALK Reverse Primer
ccactgaggccactgttttt

SEQ ID NO: 24456 - DNA, 20 bp, Artificial Sequence
  ALK Reverse Primer
caccgtgtttccatctctca

SEQ ID NO: 24457 - DNA, 20 bp, Artificial Sequence
  ALK Reverse Primer
cctggaaatgcaggaatgat

SEQ ID NO: 24458 - DNA, 21 bp, Artificial Sequence
  ALK Reverse Primer
tttttccatgttgctcctttg

SEQ ID NO: 24459 - DNA, 20 bp, Artificial Sequence
  ALK Reverse Primer
cattgattgtgcccactttg

SEQ ID NO: 24460 - DNA, 20 bp, Artificial Sequence
  ALK Reverse Primer
accatactcccaaactggca

SEQ ID NO: 24461 - DNA, 20 bp, Artificial Sequence
  ALK Reverse Primer
agttggaccacctttccaca

SEQ ID NO: 24462 - DNA, 20 bp, Artificial Sequence
  ALK Reverse Primer
ggctttggagagagggagat

SEQ ID NO: 24463 - DNA, 20 bp, Artificial Sequence
  ALK Reverse Primer
tgtcagttgcctgaaaagca

SEQ ID NO: 24464 - DNA, 20 bp, Artificial Sequence
  ALK Reverse Primer
atcagtcatgccagggaaac

SEQ ID NO: 24465 - DNA, 20 bp, Artificial Sequence
  ALK Reverse Primer
acttcccatcccctcatctc

SEQ ID NO: 24466 - DNA, 20 bp, Artificial Sequence
  ALK Reverse Primer
tgatcagtttggggttctcc

SEQ ID NO: 24467 - DNA, 27 bp, Artificial Sequence
  ALK Reverse Primer
cgattaatcatttattgagcatctatt

SEQ ID NO: 24468 - DNA, 21 bp, Artificial Sequence
  ALK Reverse Primer
ttcccttcataacacctgcat

SEQ ID NO: 24469 - DNA, 20 bp, Artificial Sequence
  ALK Reverse Primer
aatcctttgtcccttgtccc

SEQ ID NO: 24470 - DNA, 20 bp, Artificial Sequence
  ALK Reverse Primer
ggcacgtgaacactttcaga

SEQ ID NO: 24471 - DNA, 20 bp, Artificial Sequence
  ALK Reverse Primer
ggaaagaattgaggggccta

SEQ ID NO: 24472 - DNA, 20 bp, Artificial Sequence
  ALK Reverse Primer
tcggaataatgttgctcgtg

SEQ ID NO: 24473 - DNA, 21 bp, Artificial Sequence
  ALK Reverse Primer
ttcagccatccaattcacttt

SEQ ID NO: 24474 - DNA, 22 bp, Artificial Sequence
  ALK Reverse Primer
ttgatgacaatgttgatgatgg

SEQ ID NO: 24475 - DNA, 20 bp, Artificial Sequence
  ALK Reverse Primer
gaatagggtccagtgtggga

SEQ ID NO: 24476 - DNA, 20 bp, Artificial Sequence
  ALK Reverse Primer
atgggttccatccctagctt

SEQ ID NO: 24477 - DNA, 20 bp, Artificial Sequence
  ALK Reverse Primer
aatgtgagacaggacagggc

SEQ ID NO: 24478 - DNA, 20 bp, Artificial Sequence
  ALK Reverse Primer
ttcttttcactgcatgccac

SEQ ID NO: 24479 - DNA, 20 bp, Artificial Sequence
  ALK Reverse Primer
atggaagggtgaaagagcct

SEQ ID NO: 24480 - DNA, 20 bp, Artificial Sequence
  ALK Reverse Primer
ctctgagccaggaaatccaa

SEQ ID NO: 24481 - DNA, 21 bp, Artificial Sequence
  ALK Reverse Primer
cctcattcaccaagctctctg

SEQ ID NO: 24482 - DNA, 20 bp, Artificial Sequence
  ALK Reverse Primer
acccctttatgttccaggct

SEQ ID NO: 24483 - DNA, 20 bp, Artificial Sequence
  ALK Reverse Primer
acaaccagaagccagagagc

SEQ ID NO: 24484 - DNA, 20 bp, Artificial Sequence
  ALK Reverse Primer
gccagggctagtaaccatca

SEQ ID NO: 24485 - DNA, 20 bp, Artificial Sequence
  ALK Reverse Primer
cagcttgagtcctggctttc

SEQ ID NO: 24486 - DNA, 20 bp, Artificial Sequence
  ALK Reverse Primer
aaagggagggggatctcaac

SEQ ID NO: 24487 - DNA, 22 bp, Artificial Sequence
  ALK Reverse Primer
ggaggaaaggcagtacattttt

SEQ ID NO: 24488 - DNA, 20 bp, Artificial Sequence
  ALK Reverse Primer
aagtttaacaaagccagcca

SEQ ID NO: 24489 - DNA, 20 bp, Artificial Sequence
  ALK Reverse Primer
ccggaatgtgatgatgattg

SEQ ID NO: 24490 - DNA, 20 bp, Artificial Sequence
  ALK Reverse Primer
ttagcagcaacagagcatgg

SEQ ID NO: 24491 - DNA, 20 bp, Artificial Sequence
  ALK Reverse Primer
ttttggaccaggagagcaat

SEQ ID NO: 24492 - DNA, 20 bp, Artificial Sequence
  ALK Reverse Primer
cactgtgcctccctttcaat

SEQ ID NO: 24493 - DNA, 19 bp, Artificial Sequence
  ALK Reverse Primer
ctgctcccctcagcagaat

SEQ ID NO: 24494 - DNA, 20 bp, Artificial Sequence
  ALK Reverse Primer
ccgtctctgactgtgctcaa

SEQ ID NO: 24495 - DNA, 20 bp, Artificial Sequence
  ALK Reverse Primer
aaggagaccctggagaagga

SEQ ID NO: 24496 - DNA, 20 bp, Artificial Sequence
  ALK Reverse Primer
acggtggtgaaaatgagtcc

SEQ ID NO: 24497 - DNA, 20 bp, Artificial Sequence
  ALK Reverse Primer
acaatgtccccagtgttggt

SEQ ID NO: 24498 - DNA, 20 bp, Artificial Sequence
  ALK Reverse Primer
tgtcaatgtggtagggagca

SEQ ID NO: 24499 - DNA, 20 bp, Artificial Sequence
  ALK Reverse Primer
cttagcaagggacagaggga

SEQ ID NO: 24500 - DNA, 20 bp, Artificial Sequence
  ALK Reverse Primer
cgtcggagagtttcaaggac

SEQ ID NO: 24501 - DNA, 20 bp, Artificial Sequence
  ALK Reverse Primer
ttacattgggggagctcaag

SEQ ID NO: 24502 - DNA, 20 bp, Artificial Sequence
  ALK Reverse Primer
caccaatcctggttccactt

SEQ ID NO: 24503 - DNA, 20 bp, Artificial Sequence
  ALK Reverse Primer
actgcgaagacatcatccct

SEQ ID NO: 24504 - DNA, 20 bp, Artificial Sequence
  ALK Reverse Primer
gcccatgcattgttctttct

SEQ ID NO: 24505 - DNA, 20 bp, Artificial Sequence
  ALK Reverse Primer
tctccagtgttccttctgcc

SEQ ID NO: 24506 - DNA, 20 bp, Artificial Sequence
  ALK Reverse Primer
gcttcccattggtctcagaa

SEQ ID NO: 24507 - DNA, 20 bp, Artificial Sequence
  ALK Reverse Primer
actcttcaccccatatcccc

SEQ ID NO: 24508 - DNA, 20 bp, Artificial Sequence
  ALK Reverse Primer
ggtgtcccacccagtagaga

SEQ ID NO: 24509 - DNA, 20 bp, Artificial Sequence
  ALK Reverse Primer
gcctaacgtagaactccccc

SEQ ID NO: 24510 - DNA, 20 bp, Artificial Sequence
  ALK Reverse Primer
aagagctgaatggtgctggt

SEQ ID NO: 24511 - DNA, 20 bp, Artificial Sequence
  ALK Reverse Primer
agatcatcgggtgaggtgag

SEQ ID NO: 24512 - DNA, 20 bp, Artificial Sequence
  ALK Reverse Primer
cctgatgagctcaccctgtt

SEQ ID NO: 24513 - DNA, 20 bp, Artificial Sequence
  ALK Reverse Primer
tggtgaacaggccttcagat

SEQ ID NO: 24514 - DNA, 20 bp, Artificial Sequence
  ALK Reverse Primer
cagtgcactccccaagttct

SEQ ID NO: 24515 - DNA, 20 bp, Artificial Sequence
  ALK Reverse Primer
tgtgccacattttctgcatt

SEQ ID NO: 24516 - DNA, 20 bp, Artificial Sequence
  ALK Reverse Primer
gtccacagatgggcatacct

SEQ ID NO: 24517 - DNA, 20 bp, Artificial Sequence
  ALK Reverse Primer
gggatgtgttgaggatgctt

SEQ ID NO: 24518 - DNA, 23 bp, Artificial Sequence
  ALK Reverse Primer
ggattcatgaggactcagagaga

SEQ ID NO: 24519 - DNA, 20 bp, Artificial Sequence
  ALK Reverse Primer
ttctggttctccagtgtccc

SEQ ID NO: 24520 - DNA, 20 bp, Artificial Sequence
  ALK Reverse Primer
gagccacaggttttgtgtca

SEQ ID NO: 24521 - DNA, 22 bp, Artificial Sequence
  ALK Reverse Primer
ggaaattaagcaacttcccaaa

SEQ ID NO: 24522 - DNA, 20 bp, Artificial Sequence
  ALK Reverse Primer
tctcagaaaacatcagccca

SEQ ID NO: 24523 - DNA, 22 bp, Artificial Sequence
  ALK Reverse Primer
tgaaaaggagatgaggaagtga

SEQ ID NO: 24524 - DNA, 20 bp, Artificial Sequence
  ALK Reverse Primer
acagagagcaaggcagtggt

SEQ ID NO: 24525 - DNA, 24 bp, Artificial Sequence
  ALK Reverse Primer
caaacttcagttttgagatgttga

SEQ ID NO: 24526 - DNA, 20 bp, Artificial Sequence
  ALK Reverse Primer
gtatgggaaccccagacctt

SEQ ID NO: 24527 - DNA, 20 bp, Artificial Sequence
  ALK Reverse Primer
caggaggtggcatttgaact

SEQ ID NO: 24528 - DNA, 20 bp, Artificial Sequence
  ALK Reverse Primer
tatccccacccctaccatct

SEQ ID NO: 24529 - DNA, 23 bp, Artificial Sequence
  ALK Reverse Primer
tttagttacatctgcatcttccg

SEQ ID NO: 24530 - DNA, 20 bp, Artificial Sequence
  ALK Reverse Primer
cactgtcactgtcagagccc

SEQ ID NO: 24531 - DNA, 20 bp, Artificial Sequence
  ALK Reverse Primer
ccattgcaagctggagagat

SEQ ID NO: 24532 - DNA, 20 bp, Artificial Sequence
  ALK Reverse Primer
cccactattcctccccctta

SEQ ID NO: 24533 - DNA, 21 bp, Artificial Sequence
  ALK Reverse Primer
gttgactgggcagtatttcca

SEQ ID NO: 24534 - DNA, 20 bp, Artificial Sequence
  ALK Reverse Primer
agattaacctggactccccg

SEQ ID NO: 24535 - DNA, 20 bp, Artificial Sequence
  ALK Reverse Primer
gtggcaacaccaggacaata

SEQ ID NO: 24536 - DNA, 20 bp, Artificial Sequence
  ALK Reverse Primer
aacggagtttgacttggtgg

SEQ ID NO: 24537 - DNA, 20 bp, Artificial Sequence
  ALK Reverse Primer
tgttcccctaattgccagag

SEQ ID NO: 24538 - DNA, 20 bp, Artificial Sequence
  ALK Reverse Primer
aaccccagccacctaaagtt

SEQ ID NO: 24539 - DNA, 20 bp, Artificial Sequence
  ALK Reverse Primer
ggcagtctgtcttccctttg

SEQ ID NO: 24540 - DNA, 20 bp, Artificial Sequence
  ALK Reverse Primer
gcaaaacagatcaccccatt

SEQ ID NO: 24541 - DNA, 20 bp, Artificial Sequence
  ALK Reverse Primer
cttcacccatgactgcctct

SEQ ID NO: 24542 - DNA, 20 bp, Artificial Sequence
  ALK Reverse Primer
gcaggcctcagagtgatttc

SEQ ID NO: 24543 - DNA, 20 bp, Artificial Sequence
  ALK Reverse Primer
ccatttgtggccttaaccat

SEQ ID NO: 24544 - DNA, 20 bp, Artificial Sequence
  ALK Reverse Primer
tctgcaatgcctagcacagt

SEQ ID NO: 24545 - DNA, 20 bp, Artificial Sequence
  ALK Reverse Primer
cagttcaagccattttgcct

SEQ ID NO: 24546 - DNA, 20 bp, Artificial Sequence
  ALK Reverse Primer
gccccatgttggaataaatg

SEQ ID NO: 24547 - DNA, 20 bp, Artificial Sequence
  ALK Reverse Primer
aggaccttgctccaccctat

SEQ ID NO: 24548 - DNA, 20 bp, Artificial Sequence
  ALK Reverse Primer
gaagagccatagcagccttg

SEQ ID NO: 24549 - DNA, 20 bp, Artificial Sequence
  ALK Reverse Primer
ctccgctctcctgtcttctg

SEQ ID NO: 24550 - DNA, 20 bp, Artificial Sequence
  ALK Reverse Primer
atctgagcccagctaatcca

SEQ ID NO: 24551 - DNA, 20 bp, Artificial Sequence
  ALK Reverse Primer
ggaattcacgtcccttcctt

SEQ ID NO: 24552 - DNA, 20 bp, Artificial Sequence
  ALK Reverse Primer
gtccccactttgcaagaaga

SEQ ID NO: 24553 - DNA, 20 bp, Artificial Sequence
  ALK Reverse Primer
acagcaaagcctcatcccta

SEQ ID NO: 24554 - DNA, 20 bp, Artificial Sequence
  ALK Reverse Primer
gtaatgggtgctgtgcattg

SEQ ID NO: 24555 - DNA, 20 bp, Artificial Sequence
  ALK Reverse Primer
ctctgccctggatgtttgat

SEQ ID NO: 24556 - DNA, 20 bp, Artificial Sequence
  ALK Reverse Primer
cccacacccaggaataaatg

SEQ ID NO: 24557 - DNA, 20 bp, Artificial Sequence
  ALK Reverse Primer
tggtcatctaattctggccc

SEQ ID NO: 24558 - DNA, 20 bp, Artificial Sequence
  ALK Reverse Primer
agtgcatgttcagtttgcca

SEQ ID NO: 24559 - DNA, 20 bp, Artificial Sequence
  ALK Reverse Primer
cacttatgggtggacaggct

SEQ ID NO: 24560 - DNA, 20 bp, Artificial Sequence
  ALK Reverse Primer
ttactcgtcttggagtgggc

SEQ ID NO: 24561 - DNA, 20 bp, Artificial Sequence
  ALK Reverse Primer
caggaagagagccagggtta

SEQ ID NO: 24562 - DNA, 20 bp, Artificial Sequence
  ALK Reverse Primer
acacagtgggcaggagactt

SEQ ID NO: 24563 - DNA, 20 bp, Artificial Sequence
  ALK Reverse Primer
gtcacaatgatttcaggccc

SEQ ID NO: 24564 - DNA, 20 bp, Artificial Sequence
  ALK Reverse Primer
gagagatggtctcagggcag

SEQ ID NO: 24565 - DNA, 20 bp, Artificial Sequence
  ALK Reverse Primer
tttgcagcatggttatggac

SEQ ID NO: 24566 - DNA, 20 bp, Artificial Sequence
  ALK Reverse Primer
gcaaagccaggactcatctc

SEQ ID NO: 24567 - DNA, 20 bp, Artificial Sequence
  ALK Reverse Primer
caaggggatagaagttgcca

SEQ ID NO: 24568 - DNA, 20 bp, Artificial Sequence
  ALK Reverse Primer
ccacactgccattctgatgt

SEQ ID NO: 24569 - DNA, 20 bp, Artificial Sequence
  ALK Reverse Primer
caccatcatggattgagtgc

SEQ ID NO: 24570 - DNA, 20 bp, Artificial Sequence
  ALK Reverse Primer
ataggggctaccaaacagcc

SEQ ID NO: 24571 - DNA, 20 bp, Artificial Sequence
  ALK Reverse Primer
agcagactggttggaagcac

SEQ ID NO: 24572 - DNA, 20 bp, Artificial Sequence
  ALK Reverse Primer
gtgatgattacgaatggggc

SEQ ID NO: 24573 - DNA, 20 bp, Artificial Sequence
  ALK Reverse Primer
cccatgagatctgtgtggtg

SEQ ID NO: 24574 - DNA, 20 bp, Artificial Sequence
  ALK Reverse Primer
ccttcaagacaaatgagccc

SEQ ID NO: 24575 - DNA, 20 bp, Artificial Sequence
  ALK Reverse Primer
ttcagcacttcttgtgtggc

SEQ ID NO: 24576 - DNA, 20 bp, Artificial Sequence
  ALK Reverse Primer
gctatcttctggcaccaagc

SEQ ID NO: 24577 - DNA, 20 bp, Artificial Sequence
  ALK Reverse Primer
gctttggcaataaggctgaa

SEQ ID NO: 24578 - DNA, 20 bp, Artificial Sequence
  ALK Reverse Primer
cagtgatccatcaggcctct

SEQ ID NO: 24579 - DNA, 22 bp, Artificial Sequence
  ALK Reverse Primer
tcaaagaaatgttaaaaggcca

SEQ ID NO: 24580 - DNA, 20 bp, Artificial Sequence
  ALK Reverse Primer
caggtgatttggcttttggt

SEQ ID NO: 24581 - DNA, 20 bp, Artificial Sequence
  ALK Reverse Primer
gtccacctgcatcaggctat

SEQ ID NO: 24582 - DNA, 20 bp, Artificial Sequence
  ALK Reverse Primer
ttgagttcagccaaccctct

SEQ ID NO: 24583 - DNA, 20 bp, Artificial Sequence
  ALK Reverse Primer
ccactgtggaagtcagggat

SEQ ID NO: 24584 - DNA, 20 bp, Artificial Sequence
  ALK Reverse Primer
ttctcgatccagctcagaca

SEQ ID NO: 24585 - DNA, 20 bp, Artificial Sequence
  ALK Reverse Primer
gggccagtgaaaaagaaaca

SEQ ID NO: 24586 - DNA, 20 bp, Artificial Sequence
  ALK Reverse Primer
tgttttgcctggatgtgtgt

SEQ ID NO: 24587 - DNA, 20 bp, Artificial Sequence
  ALK Reverse Primer
gctggaaatcttcagccaag

SEQ ID NO: 24588 - DNA, 20 bp, Artificial Sequence
  ALK Reverse Primer
atcctaaccccaggccatac

SEQ ID NO: 24589 - DNA, 20 bp, Artificial Sequence
  ALK Reverse Primer
tggagaggagcagtgacaca

SEQ ID NO: 24590 - DNA, 21 bp, Artificial Sequence
  ALK Reverse Primer
ttggtagaggaaagctgctga

SEQ ID NO: 24591 - DNA, 20 bp, Artificial Sequence
  ALK Reverse Primer
taatgtgagccctgctggtt

SEQ ID NO: 24592 - DNA, 21 bp, Artificial Sequence
  ALK Reverse Primer
ctgacagtttggggctgtaag

SEQ ID NO: 24593 - DNA, 20 bp, Artificial Sequence
  ALK Reverse Primer
atgtggcaagcattgtgttg

SEQ ID NO: 24594 - DNA, 20 bp, Artificial Sequence
  ALK Reverse Primer
cctggagctgttggaagaag

SEQ ID NO: 24595 - DNA, 20 bp, Artificial Sequence
  ALK Reverse Primer
tcctgcttggagtagaatgc

SEQ ID NO: 24596 - DNA, 20 bp, Artificial Sequence
  ALK Reverse Primer
tgtaccgtaggcccagaaag

SEQ ID NO: 24597 - DNA, 20 bp, Artificial Sequence
  ALK Reverse Primer
attttcccaaagcagagggt

SEQ ID NO: 24598 - DNA, 20 bp, Artificial Sequence
  ALK Reverse Primer
gaggcctctggttcagaaaa

SEQ ID NO: 24599 - DNA, 20 bp, Artificial Sequence
  ALK Reverse Primer
ttgttgtacccaggagtccc

SEQ ID NO: 24600 - DNA, 20 bp, Artificial Sequence
  ALK Reverse Primer
ttgcagatccaccaccaata

SEQ ID NO: 24601 - DNA, 20 bp, Artificial Sequence
  ALK Reverse Primer
ccctcaaatactgctcagcc

SEQ ID NO: 24602 - DNA, 20 bp, Artificial Sequence
  ALK Reverse Primer
ttgacatcgagacagaggga

SEQ ID NO: 24603 - DNA, 20 bp, Artificial Sequence
  ALK Reverse Primer
ccttttcagtttgcagaggc

SEQ ID NO: 24604 - DNA, 21 bp, Artificial Sequence
  ALK Reverse Primer
tcattttgttcccctttctcc

SEQ ID NO: 24605 - DNA, 20 bp, Artificial Sequence
  ALK Reverse Primer
tcccttgacatctgggactt

SEQ ID NO: 24606 - DNA, 20 bp, Artificial Sequence
  ALK Reverse Primer
cattctcagcttccctttgc

SEQ ID NO: 24607 - DNA, 20 bp, Artificial Sequence
  ALK Reverse Primer
ggccccgtattatggaattt

SEQ ID NO: 24608 - DNA, 20 bp, Artificial Sequence
  ALK Reverse Primer
cgggactaataggcactgga

SEQ ID NO: 24609 - DNA, 20 bp, Artificial Sequence
  ALK Reverse Primer
gcaacaagatcagacagcca

SEQ ID NO: 24610 - DNA, 22 bp, Artificial Sequence
  ALK Reverse Primer
ccaaaatggaatggttaattgg

SEQ ID NO: 24611 - DNA, 20 bp, Artificial Sequence
  ALK Reverse Primer
cccgtaaataatgctgggaa

SEQ ID NO: 24612 - DNA, 20 bp, Artificial Sequence
  ALK Reverse Primer
atcagctttgtggctatggg

SEQ ID NO: 24613 - DNA, 23 bp, Artificial Sequence
  ALK Reverse Primer
cctccagagttacccattttaca

SEQ ID NO: 24614 - DNA, 20 bp, Artificial Sequence
  ALK Reverse Primer
ggggaaatgactcaacctca

SEQ ID NO: 24615 - DNA, 20 bp, Artificial Sequence
  ALK Reverse Primer
aatttccagccaaagatcca

SEQ ID NO: 24616 - DNA, 20 bp, Artificial Sequence
  ALK Reverse Primer
tccttcccttttccaaatcc

SEQ ID NO: 24617 - DNA, 20 bp, Artificial Sequence
  ALK Reverse Primer
ccatatttccatgactgggg

SEQ ID NO: 24618 - DNA, 20 bp, Artificial Sequence
  ALK Reverse Primer
tgctttccaaagaaattggg

SEQ ID NO: 24619 - DNA, 20 bp, Artificial Sequence
  ALK Reverse Primer
agagctctgaacagtgggga

SEQ ID NO: 24620 - DNA, 20 bp, Artificial Sequence
  ALK Reverse Primer
tatttgccctgccttacctg

SEQ ID NO: 24621 - DNA, 20 bp, Artificial Sequence
  ALK Reverse Primer
aacaccaaatggaggctacc

SEQ ID NO: 24622 - DNA, 21 bp, Artificial Sequence
  ALK Reverse Primer
tgcctgttcagaacctacaca

SEQ ID NO: 24623 - DNA, 20 bp, Artificial Sequence
  ALK Reverse Primer
ccaaaagacccaggatctga

SEQ ID NO: 24624 - DNA, 20 bp, Artificial Sequence
  ALK Reverse Primer
ctttatacatcccccacccc

SEQ ID NO: 24625 - DNA, 21 bp, Artificial Sequence
  ALK Reverse Primer
ggaatcaaacaaggaatgcag

SEQ ID NO: 24626 - DNA, 20 bp, Artificial Sequence
  ALK Reverse Primer
cacaaagctccaaggagagg

SEQ ID NO: 24627 - DNA, 20 bp, Artificial Sequence
  ALK Reverse Primer
gaagggtgagcagattccaa

SEQ ID NO: 24628 - DNA, 20 bp, Artificial Sequence
  ALK Reverse Primer
gtccaccgtatgccagaact

SEQ ID NO: 24629 - DNA, 22 bp, Artificial Sequence
  ALK Reverse Primer
caaggttcttctgtctgaaccc

SEQ ID NO: 24630 - DNA, 20 bp, Artificial Sequence
  ALK Reverse Primer
gatgcttggtctcttggctc

SEQ ID NO: 24631 - DNA, 20 bp, Artificial Sequence
  ALK Reverse Primer
tctcatgggattgaaggtga

SEQ ID NO: 24632 - DNA, 20 bp, Artificial Sequence
  ALK Reverse Primer
gatggatgtgccattgacag

SEQ ID NO: 24633 - DNA, 19 bp, Artificial Sequence
  ALK Reverse Primer
gtcattttcatggggagcc

SEQ ID NO: 24634 - DNA, 20 bp, Artificial Sequence
  ALK Reverse Primer
aaggggatgctggacctagt

SEQ ID NO: 24635 - DNA, 20 bp, Artificial Sequence
  ALK Reverse Primer
gggtgagcatttggaagttt

SEQ ID NO: 24636 - DNA, 20 bp, Artificial Sequence
  ALK Reverse Primer
tccagtaaattgggtccaca

SEQ ID NO: 24637 - DNA, 20 bp, Artificial Sequence
  ALK Reverse Primer
cagcctggagtttaaatggc

SEQ ID NO: 24638 - DNA, 21 bp, Artificial Sequence
  ALK Reverse Primer
tgtaaagacaccctacccagg

SEQ ID NO: 24639 - DNA, 20 bp, Artificial Sequence
  ALK Reverse Primer
agggcatgtgctaggttttg

SEQ ID NO: 24640 - DNA, 20 bp, Artificial Sequence
  ALK Reverse Primer
ctttatgcaaggcacagggt

SEQ ID NO: 24641 - DNA, 22 bp, Artificial Sequence
  ALK Reverse Primer
tctgcaaatatgagtgcctttt

SEQ ID NO: 24642 - DNA, 20 bp, Artificial Sequence
  ALK Reverse Primer
tgggttcccagtctctctgt

SEQ ID NO: 24643 - DNA, 20 bp, Artificial Sequence
  ALK Reverse Primer
cagagggcaatgtcacttca

SEQ ID NO: 24644 - DNA, 20 bp, Artificial Sequence
  ALK Reverse Primer
ggcctcccctcaataactgt

SEQ ID NO: 24645 - DNA, 20 bp, Artificial Sequence
  ALK Reverse Primer
gccctgctcttctttgtgac

SEQ ID NO: 24646 - DNA, 20 bp, Artificial Sequence
  ALK Reverse Primer
aatagcagtcccctcacctg

SEQ ID NO: 24647 - DNA, 20 bp, Artificial Sequence
  ALK Reverse Primer
agttctggcaaactcggtgt

SEQ ID NO: 24648 - DNA, 20 bp, Artificial Sequence
  ALK Reverse Primer
cctccagaaatctccaacca

SEQ ID NO: 24649 - DNA, 20 bp, Artificial Sequence
  ALK Reverse Primer
tgatcatctcccaggtcatt

SEQ ID NO: 24650 - DNA, 20 bp, Artificial Sequence
  ALK Reverse Primer
atccctcctgcactgtgact

SEQ ID NO: 24651 - DNA, 20 bp, Artificial Sequence
  ALK Reverse Primer
tgagatggaaaacactggca

SEQ ID NO: 24652 - DNA, 20 bp, Artificial Sequence
  ALK Reverse Primer
aggagcaagcatgcaaagtt

SEQ ID NO: 24653 - DNA, 21 bp, Artificial Sequence
  ALK Reverse Primer
aggctgagctttctctgaaac

SEQ ID NO: 24654 - DNA, 20 bp, Artificial Sequence
  ALK Reverse Primer
cacttttgctgtgtgctggt

SEQ ID NO: 24655 - DNA, 20 bp, Artificial Sequence
  ALK Reverse Primer
tcggcagtgacacttgttgt

SEQ ID NO: 24656 - DNA, 20 bp, Artificial Sequence
  ALK Reverse Primer
gtgagcttacagagcagggg

SEQ ID NO: 24657 - DNA, 20 bp, Artificial Sequence
  ALK Reverse Primer
ttcaaagtgctgtcattgcc

SEQ ID NO: 24658 - DNA, 20 bp, Artificial Sequence
  ALK Reverse Primer
ttccaaccccatgctctaag

SEQ ID NO: 24659 - DNA, 21 bp, Artificial Sequence
  ALK Reverse Primer
tgggcatgttctttgagtcat

SEQ ID NO: 24660 - DNA, 20 bp, Artificial Sequence
  ALK Reverse Primer
tagagtggatgtggggttcc

SEQ ID NO: 24661 - DNA, 23 bp, Artificial Sequence
  ALK Reverse Primer
ggagactttgctagttgtttcca

SEQ ID NO: 24662 - DNA, 22 bp, Artificial Sequence
  ALK Reverse Primer
ttccaagtccagtgtctttgtg

SEQ ID NO: 24663 - DNA, 20 bp, Artificial Sequence
  ALK Reverse Primer
ctcctgcagaccctgtttct

SEQ ID NO: 24664 - DNA, 20 bp, Artificial Sequence
  ALK Reverse Primer
tcttccccctcctttttctc

SEQ ID NO: 24665 - DNA, 20 bp, Artificial Sequence
  ALK Reverse Primer
agagagaccctcaagtgcca

SEQ ID NO: 24666 - DNA, 20 bp, Artificial Sequence
  ALK Reverse Primer
atgcagggcaagtgacaagt

SEQ ID NO: 24667 - DNA, 20 bp, Artificial Sequence
  ALK Reverse Primer
tgttcagctcccatgttttg

SEQ ID NO: 24668 - DNA, 20 bp, Artificial Sequence
  ALK Reverse Primer
ctagagacgggatggtgagc

SEQ ID NO: 24669 - DNA, 20 bp, Artificial Sequence
  ALK Reverse Primer
agacggacctctgatccaaa

SEQ ID NO: 24670 - DNA, 19 bp, Artificial Sequence
  ALK Reverse Primer
tcagatagggggttctggc

SEQ ID NO: 24671 - DNA, 20 bp, Artificial Sequence
  ALK Reverse Primer
aggtggatggagaagtggtg

SEQ ID NO: 24672 - DNA, 20 bp, Artificial Sequence
  ALK Reverse Primer
gaggcgcttcataccagaag

SEQ ID NO: 24673 - DNA, 20 bp, Artificial Sequence
  ALK Reverse Primer
gaggctctcacagggacttg

SEQ ID NO: 24674 - DNA, 20 bp, Artificial Sequence
  ALK Reverse Primer
ggaatctcgcaagaagcaaa

SEQ ID NO: 24675 - DNA, 20 bp, Artificial Sequence
  ALK Reverse Primer
cgagccttcgtgctttattc

SEQ ID NO: 24676 - DNA, 20 bp, Artificial Sequence
  ALK Reverse Primer
ccaaaggactgggaactcac

SEQ ID NO: 24677 - DNA, 20 bp, Artificial Sequence
  ALK Reverse Primer
gcacatcttaactgggaggc

SEQ ID NO: 24678 - DNA, 21 bp, Artificial Sequence
  ALK Reverse Primer
caagcacacttgtaagccaga

SEQ ID NO: 24679 - DNA, 20 bp, Artificial Sequence
  ALK Reverse Primer
agagcacctgctgaggacat

SEQ ID NO: 24680 - DNA, 20 bp, Artificial Sequence
  ALK Reverse Primer
attcctaccaccttcccacc

SEQ ID NO: 24681 - DNA, 18 bp, Artificial Sequence
  ALK Reverse Primer
tttgcagagctgggggag

SEQ ID NO: 24682 - DNA, 20 bp, Artificial Sequence
  ALK Reverse Primer
aaacagtctggcttcgagga

SEQ ID NO: 24683 - DNA, 20 bp, Artificial Sequence
  ALK Reverse Primer
ggtgaccccttcatcatcac

SEQ ID NO: 24684 - DNA, 20 bp, Artificial Sequence
  ALK Reverse Primer
gctcagattgtctgaagggc

SEQ ID NO: 24685 - DNA, 20 bp, Artificial Sequence
  ALK Reverse Primer
accatccataggtgaggcaa

SEQ ID NO: 24686 - DNA, 20 bp, Artificial Sequence
  ALK Reverse Primer
aggacatcgctgaggacatc

SEQ ID NO: 24687 - DNA, 20 bp, Artificial Sequence
  ALK Reverse Primer
agctgtatatcggtgtgccc

SEQ ID NO: 24688 - DNA, 20 bp, Artificial Sequence
  ALK Reverse Primer
aaattctgtggctgtttggg

SEQ ID NO: 24689 - DNA, 21 bp, Artificial Sequence
  ALK Reverse Primer
aggtagtgcacggtaatcacg

SEQ ID NO: 24690 - DNA, 20 bp, Artificial Sequence
  ALK Reverse Primer
agtgttgcctggtatctggg

SEQ ID NO: 24691 - DNA, 20 bp, Artificial Sequence
  ALK Reverse Primer
cctcagcaaaaccccataga

SEQ ID NO: 24692 - DNA, 20 bp, Artificial Sequence
  ALK Reverse Primer
ctccttcctgttttggggat

SEQ ID NO: 24693 - DNA, 20 bp, Artificial Sequence
  ALK Reverse Primer
gctttgtacagtgaaggccc

SEQ ID NO: 24694 - DNA, 20 bp, Artificial Sequence
  ALK Reverse Primer
ctgtcacatccatggcactc

SEQ ID NO: 24695 - DNA, 20 bp, Artificial Sequence
  ALK Reverse Primer
ctcttagggagggcagaagc

SEQ ID NO: 24696 - DNA, 20 bp, Artificial Sequence
  ALK Reverse Primer
tgttcaagatgcagagctgg

SEQ ID NO: 24697 - DNA, 20 bp, Artificial Sequence
  ALK Reverse Primer
gcatccttgcccttcagtaa

SEQ ID NO: 24698 - DNA, 20 bp, Artificial Sequence
  ALK Reverse Primer
gagtgtgagactgccgatga

SEQ ID NO: 24699 - DNA, 20 bp, Artificial Sequence
  ALK Reverse Primer
acacacgaagcaaagcacac

SEQ ID NO: 24700 - DNA, 22 bp, Artificial Sequence
  ALK Reverse Primer
cttctttgcatcatcacctaaa

SEQ ID NO: 24701 - DNA, 21 bp, Artificial Sequence
  ALK Reverse Primer
aacaaaatggaaacacaagca

SEQ ID NO: 24702 - DNA, 20 bp, Artificial Sequence
  ALK Reverse Primer
tggggctttctgattcactt

SEQ ID NO: 24703 - DNA, 20 bp, Artificial Sequence
  ALK Reverse Primer
catctcagtgctcctccgtc

SEQ ID NO: 24704 - DNA, 20 bp, Artificial Sequence
  ALK Reverse Primer
ggcaatagccaggaatctca

SEQ ID NO: 24705 - DNA, 19 bp, Artificial Sequence
  ALK Reverse Primer
tttaggggcctggaccttt

SEQ ID NO: 24706 - DNA, 20 bp, Artificial Sequence
  ALK Reverse Primer
aaggggtcactgcataaacg

SEQ ID NO: 24707 - DNA, 23 bp, Artificial Sequence
  ALK Reverse Primer
tgatacatctcacctatcatcgc

SEQ ID NO: 24708 - DNA, 20 bp, Artificial Sequence
  ALK Reverse Primer
caacttctcctgtcacgggt

SEQ ID NO: 24709 - DNA, 20 bp, Artificial Sequence
  ALK Reverse Primer
gcaggctgtgagtgtttgag

SEQ ID NO: 24710 - DNA, 20 bp, Artificial Sequence
  ALK Reverse Primer
ctttctgccaaagtgcttcc

SEQ ID NO: 24711 - DNA, 20 bp, Artificial Sequence
  ALK Reverse Primer
ggccctggagatgtattcaa

SEQ ID NO: 24712 - DNA, 20 bp, Artificial Sequence
  ALK Reverse Primer
ggtcaactgaaaacaagccg

SEQ ID NO: 24713 - DNA, 20 bp, Artificial Sequence
  ALK Reverse Primer
cccaaattcaagagcagctt

SEQ ID NO: 24714 - DNA, 21 bp, Artificial Sequence
  ALK Reverse Primer
tgagaaaaattcaaaatgcca

SEQ ID NO: 24715 - DNA, 20 bp, Artificial Sequence
  ALK Reverse Primer
tgctgaaagatgccagtgac

SEQ ID NO: 24716 - DNA, 20 bp, Artificial Sequence
  ALK Reverse Primer
ccaggaacaaaggatgagga

SEQ ID NO: 24717 - DNA, 20 bp, Artificial Sequence
  ALK Reverse Primer
actcccttctcccaccaagt

SEQ ID NO: 24718 - DNA, 20 bp, Artificial Sequence
  ALK Reverse Primer
ccattctccctcccaagact

SEQ ID NO: 24719 - DNA, 20 bp, Artificial Sequence
  ALK Reverse Primer
ccctgtttctccataggcaa

SEQ ID NO: 24720 - DNA, 20 bp, Artificial Sequence
  ALK Reverse Primer
cggccaatattcttctcagg

SEQ ID NO: 24721 - DNA, 20 bp, Artificial Sequence
  ALK Reverse Primer
tcagctcaacactcacagca

SEQ ID NO: 24722 - DNA, 20 bp, Artificial Sequence
  ALK Reverse Primer
cgcatgacttcctttccatt

SEQ ID NO: 24723 - DNA, 20 bp, Artificial Sequence
  ALK Reverse Primer
tgtgtctctgcttccacctg

SEQ ID NO: 24724 - DNA, 20 bp, Artificial Sequence
  ALK Reverse Primer
tgtccagggttcttctgctt

SEQ ID NO: 24725 - DNA, 20 bp, Artificial Sequence
  ALK Reverse Primer
caaacgtgtgcaattgaaag

SEQ ID NO: 24726 - DNA, 20 bp, Artificial Sequence
  ALK Reverse Primer
tggcagcaacacatttagga

SEQ ID NO: 24727 - DNA, 20 bp, Artificial Sequence
  ALK Reverse Primer
ggaattctcaagtggccaga

SEQ ID NO: 24728 - DNA, 20 bp, Artificial Sequence
  ALK Reverse Primer
caactaaagacccagcagcc

SEQ ID NO: 24729 - DNA, 19 bp, Artificial Sequence
  ALK Reverse Primer
cgtcaggggattggatttc

SEQ ID NO: 24730 - DNA, 20 bp, Artificial Sequence
  ALK Reverse Primer
ctgaggactccatggcaaat

SEQ ID NO: 24731 - DNA, 21 bp, Artificial Sequence
  ALK Reverse Primer
gctccaggagtcttcaaggtt

SEQ ID NO: 24732 - DNA, 20 bp, Artificial Sequence
  ALK Reverse Primer
gcaggtgacaaaacccaaat

SEQ ID NO: 24733 - DNA, 20 bp, Artificial Sequence
  ALK Reverse Primer
atgctcccatcatctcaagg

SEQ ID NO: 24734 - DNA, 20 bp, Artificial Sequence
  ALK Reverse Primer
tgcctggacatcgttatttt

SEQ ID NO: 24735 - DNA, 20 bp, Artificial Sequence
  ALK Reverse Primer
tacagcacaggccttccaat

SEQ ID NO: 24736 - DNA, 20 bp, Artificial Sequence
  ALK Reverse Primer
aaacaaagccctggtcacac

SEQ ID NO: 24737 - DNA, 20 bp, Artificial Sequence
  ALK Reverse Primer
catgagggtggtcttgtcct

SEQ ID NO: 24738 - DNA, 20 bp, Artificial Sequence
  ALK Reverse Primer
ggtgttactctcccacaggc

SEQ ID NO: 24739 - DNA, 22 bp, Artificial Sequence
  ALK Reverse Primer
cagcattttgtttcccacataa

SEQ ID NO: 24740 - DNA, 20 bp, Artificial Sequence
  ALK Reverse Primer
cctatctttggctcccacaa

SEQ ID NO: 24741 - DNA, 20 bp, Artificial Sequence
  ALK Reverse Primer
ctaggtgggtgtccctctga

SEQ ID NO: 24742 - DNA, 20 bp, Artificial Sequence
  ALK Reverse Primer
tgtattgctttcagaggcca

SEQ ID NO: 24743 - DNA, 23 bp, Artificial Sequence
  ALK Reverse Primer
tcttccattcatatccttgcatt

SEQ ID NO: 24744 - DNA, 20 bp, Artificial Sequence
  ALK Reverse Primer
cccatttgcatgactttcct

SEQ ID NO: 24745 - DNA, 20 bp, Artificial Sequence
  ALK Reverse Primer
aaatctgcatccaacccttg

SEQ ID NO: 24746 - DNA, 20 bp, Artificial Sequence
  ALK Reverse Primer
tgtccatgttggatcctgaa

SEQ ID NO: 24747 - DNA, 24 bp, Artificial Sequence
  ALK Reverse Primer
tcacttaatccttgctaaactgga

SEQ ID NO: 24748 - DNA, 20 bp, Artificial Sequence
  ALK Reverse Primer
cacctccaaatgtggtagcc

SEQ ID NO: 24749 - DNA, 20 bp, Artificial Sequence
  ALK Reverse Primer
caagtcaagtgggtgcaaag

SEQ ID NO: 24750 - DNA, 20 bp, Artificial Sequence
  ALK Reverse Primer
ttggcacaaacaggacacat

SEQ ID NO: 24751 - DNA, 21 bp, Artificial Sequence
  ALK Reverse Primer
cccaacaggaatgattgaaga

SEQ ID NO: 24752 - DNA, 20 bp, Artificial Sequence
  ALK Reverse Primer
caagggatggaaccaagacc

SEQ ID NO: 24753 - DNA, 20 bp, Artificial Sequence
  ALK Reverse Primer
aaatgaagtgaatgcctgcc

SEQ ID NO: 24754 - DNA, 20 bp, Artificial Sequence
  ALK Reverse Primer
agacacccaggtctgtccac

SEQ ID NO: 24755 - DNA, 20 bp, Artificial Sequence
  ALK Reverse Primer
gtgtttcactgcctgtgctc

SEQ ID NO: 24756 - DNA, 20 bp, Artificial Sequence
  ALK Reverse Primer
agaaatgggtgggaggtagc

SEQ ID NO: 24757 - DNA, 24 bp, Artificial Sequence
  ALK Reverse Primer
caggtgaaggtctactgagattga

SEQ ID NO: 24758 - DNA, 21 bp, Artificial Sequence
  ALK Reverse Primer
cacacctctgttcatccatcc

SEQ ID NO: 24759 - DNA, 20 bp, Artificial Sequence
  ALK Reverse Primer
actggtcattaggacggtgg

SEQ ID NO: 24760 - DNA, 22 bp, Artificial Sequence
  ALK Reverse Primer
caaaacaaaactggaaatggaa

SEQ ID NO: 24761 - DNA, 20 bp, Artificial Sequence
  ALK Reverse Primer
gagccaacagcaagtcatca

SEQ ID NO: 24762 - DNA, 20 bp, Artificial Sequence
  ALK Reverse Primer
agatttatcaggccagccgt

SEQ ID NO: 24763 - DNA, 20 bp, Artificial Sequence
  ALK Reverse Primer
aaatgatttgatgcggatgc

SEQ ID NO: 24764 - DNA, 20 bp, Artificial Sequence
  ALK Reverse Primer
ctggtgacttcagcatggaa

SEQ ID NO: 24765 - DNA, 20 bp, Artificial Sequence
  ALK Reverse Primer
agcaaacaaacaagcacacg

SEQ ID NO: 24766 - DNA, 20 bp, Artificial Sequence
  ALK Reverse Primer
tgcaacctaccagggacttt

SEQ ID NO: 24767 - DNA, 20 bp, Artificial Sequence
  ALK Reverse Primer
cacccccttcatgagctaaa

SEQ ID NO: 24768 - DNA, 20 bp, Artificial Sequence
  ALK Reverse Primer
gtggtgtgtgtatgcctgga

SEQ ID NO: 24769 - DNA, 20 bp, Artificial Sequence
  ALK Reverse Primer
cttctttgtggctcaggcat

SEQ ID NO: 24770 - DNA, 20 bp, Artificial Sequence
  ALK Reverse Primer
gacatacgccctggctaaag

SEQ ID NO: 24771 - DNA, 20 bp, Artificial Sequence
  ALK Reverse Primer
tgtctggacaggatcagtgc

SEQ ID NO: 24772 - DNA, 20 bp, Artificial Sequence
  ALK Reverse Primer
accatggttctaggcactgg

SEQ ID NO: 24773 - DNA, 18 bp, Artificial Sequence
  ALK Reverse Primer
ctgaaattgggctcgtgg

SEQ ID NO: 24774 - DNA, 20 bp, Artificial Sequence
  ALK Reverse Primer
aggtggagctggaatgtgac

SEQ ID NO: 24775 - DNA, 20 bp, Artificial Sequence
  ALK Reverse Primer
attgtggggtcagtagtggg

SEQ ID NO: 24776 - DNA, 20 bp, Artificial Sequence
  ALK Reverse Primer
ggggtgaagtgcaaaaggta

SEQ ID NO: 24777 - DNA, 20 bp, Artificial Sequence
  ALK Reverse Primer
gtccttcccttaatcctgcc

SEQ ID NO: 24778 - DNA, 20 bp, Artificial Sequence
  ALK Reverse Primer
aatttcagaggttgccatgc

SEQ ID NO: 24779 - DNA, 20 bp, Artificial Sequence
  ALK Reverse Primer
ggaaactaaggtttgcccct

SEQ ID NO: 24780 - DNA, 20 bp, Artificial Sequence
  ALK Reverse Primer
agcagatgagtgggtcaagg

SEQ ID NO: 24781 - DNA, 20 bp, Artificial Sequence
  ALK Reverse Primer
ggtcagcacctaagagcagc

SEQ ID NO: 24782 - DNA, 20 bp, Artificial Sequence
  ALK Reverse Primer
gaccctctccccaccagtat

SEQ ID NO: 24783 - DNA, 20 bp, Artificial Sequence
  ALK Reverse Primer
tcacacgctcaaagaacagg

SEQ ID NO: 24784 - DNA, 20 bp, Artificial Sequence
  ALK Reverse Primer
atccatcggggctaagttct

SEQ ID NO: 24785 - DNA, 20 bp, Artificial Sequence
  ALK Reverse Primer
ggctggaacgtctactggag

SEQ ID NO: 24786 - DNA, 20 bp, Artificial Sequence
  ALK Reverse Primer
gcgcggggttattatttctt

SEQ ID NO: 24787 - DNA, 20 bp, Artificial Sequence
  ALK Reverse Primer
caacccctatttcaaagcca

SEQ ID NO: 24788 - DNA, 21 bp, Artificial Sequence
  ALK Reverse Primer
tgcaatagcaaaaccacaaca

SEQ ID NO: 24789 - DNA, 20 bp, Artificial Sequence
  ALK Reverse Primer
agacgtctttgtgcaatccc

SEQ ID NO: 24790 - DNA, 20 bp, Artificial Sequence
  ALK Reverse Primer
tctggcagcatagtgaggtg

SEQ ID NO: 24791 - DNA, 20 bp, Artificial Sequence
  ALK Reverse Primer
atggaggtcattggttctgc

SEQ ID NO: 24792 - DNA, 21 bp, Artificial Sequence
  ALK Reverse Primer
agtggtgatttttcacggttg

SEQ ID NO: 24793 - DNA, 24 bp, Artificial Sequence
  ALK Reverse Primer
gaaattccttttcttttcacaacc

SEQ ID NO: 24794 - DNA, 20 bp, Artificial Sequence
  ALK Reverse Primer
ggtttctaccaccagcgaga

SEQ ID NO: 24795 - DNA, 20 bp, Artificial Sequence
  ALK Reverse Primer
cccagctgtgtcctctcatt

SEQ ID NO: 24796 - DNA, 20 bp, Artificial Sequence
  ALK Reverse Primer
ttccttgaatcccacacaca

SEQ ID NO: 24797 - DNA, 20 bp, Artificial Sequence
  ALK Reverse Primer
cggaaagcttttgggaaaat

SEQ ID NO: 24798 - DNA, 21 bp, Artificial Sequence
  ALK Reverse Primer
tgacacagtgatgaaaatgcc

SEQ ID NO: 24799 - DNA, 20 bp, Artificial Sequence
  ALK Reverse Primer
ccccaggtgaagcataaaga

SEQ ID NO: 24800 - DNA, 20 bp, Artificial Sequence
  ALK Reverse Primer
gggctggagaacagaagaga

SEQ ID NO: 24801 - DNA, 20 bp, Artificial Sequence
  ALK Reverse Primer
agacatgactcacgcctcct

SEQ ID NO: 24802 - DNA, 20 bp, Artificial Sequence
  ALK Reverse Primer
gcttccttcattcctttccc

SEQ ID NO: 24803 - DNA, 22 bp, Artificial Sequence
  ALK Reverse Primer
ggcctaaatggtgcttttattg

SEQ ID NO: 24804 - DNA, 20 bp, Artificial Sequence
  ALK Reverse Primer
tccagctcgtaagtttggct

SEQ ID NO: 24805 - DNA, 20 bp, Artificial Sequence
  ALK Reverse Primer
attttctgtggcgagagcac

SEQ ID NO: 24806 - DNA, 20 bp, Artificial Sequence
  ALK Reverse Primer
tgtgaggaaagcgagtctcc

SEQ ID NO: 24807 - DNA, 21 bp, Artificial Sequence
  ALK Reverse Primer
tcctctgcttgaagaaacctg

SEQ ID NO: 24808 - DNA, 20 bp, Artificial Sequence
  ALK Reverse Primer
gtggacagaaaatgccttgg

SEQ ID NO: 24809 - DNA, 20 bp, Artificial Sequence
  ALK Reverse Primer
tcgaagaaaggcaactgaca

SEQ ID NO: 24810 - DNA, 20 bp, Artificial Sequence
  ALK Reverse Primer
ttctttgcaaggaggaggaa

SEQ ID NO: 24811 - DNA, 22 bp, Artificial Sequence
  ALK Reverse Primer
aaagattcctgatacctggtgg

SEQ ID NO: 24812 - DNA, 20 bp, Artificial Sequence
  ALK Reverse Primer
gcccaagtttttcccaaatc

SEQ ID NO: 24813 - DNA, 20 bp, Artificial Sequence
  ALK Reverse Primer
agaagcagaggctcctccat

SEQ ID NO: 24814 - DNA, 20 bp, Artificial Sequence
  ALK Reverse Primer
gcacagggcaggtactgttt

SEQ ID NO: 24815 - DNA, 22 bp, Artificial Sequence
  ALK Reverse Primer
gagatgtgcacgtgaaatacag

SEQ ID NO: 24816 - DNA, 20 bp, Artificial Sequence
  ALK Reverse Primer
caaagctctgcaccagacag

SEQ ID NO: 24817 - DNA, 20 bp, Artificial Sequence
  ALK Reverse Primer
tgttgagatgccaaaaatgg

SEQ ID NO: 24818 - DNA, 20 bp, Artificial Sequence
  ALK Reverse Primer
gagagctttcatccacagcc

SEQ ID NO: 24819 - DNA, 20 bp, Artificial Sequence
  ALK Reverse Primer
gtcccagtcttctgatccca

SEQ ID NO: 24820 - DNA, 20 bp, Artificial Sequence
  ALK Reverse Primer
atttctgctggcatgaggtc

SEQ ID NO: 24821 - DNA, 20 bp, Artificial Sequence
  ALK Reverse Primer
ctgctgacatgggtgtctgt

SEQ ID NO: 24822 - DNA, 20 bp, Artificial Sequence
  ALK Reverse Primer
tgccagaaagctcagagtca

SEQ ID NO: 24823 - DNA, 20 bp, Artificial Sequence
  ALK Reverse Primer
tcaagacccagcacatttga

SEQ ID NO: 24824 - DNA, 20 bp, Artificial Sequence
  ALK Reverse Primer
cccggcacatagtaaatgct

SEQ ID NO: 24825 - DNA, 21 bp, Artificial Sequence
  ALK Reverse Primer
cctgactaattcaacacccca

SEQ ID NO: 24826 - DNA, 20 bp, Artificial Sequence
  ALK Reverse Primer
tggcattaaaattcccttgc

SEQ ID NO: 24827 - DNA, 20 bp, Artificial Sequence
  ALK Reverse Primer
ggctgttcagcagatccaac

SEQ ID NO: 24828 - DNA, 20 bp, Artificial Sequence
  ALK Reverse Primer
aggggctttcctgaaaggat

SEQ ID NO: 24829 - DNA, 20 bp, Artificial Sequence
  ALK Reverse Primer
atgtctgacaagctcccagg

SEQ ID NO: 24830 - DNA, 20 bp, Artificial Sequence
  ALK Reverse Primer
cgaattgcattcaaagctca

SEQ ID NO: 24831 - DNA, 20 bp, Artificial Sequence
  ALK Reverse Primer
gaaatttatgccgacccaga

SEQ ID NO: 24832 - DNA, 22 bp, Artificial Sequence
  ALK Reverse Primer
caattcctgaagacagtaggca

SEQ ID NO: 24833 - DNA, 20 bp, Artificial Sequence
  ALK Reverse Primer
tgacccccaagaaaccatta

SEQ ID NO: 24834 - DNA, 20 bp, Artificial Sequence
  ALK Reverse Primer
ttggttgctcctattgcttt

SEQ ID NO: 24835 - DNA, 20 bp, Artificial Sequence
  ALK Reverse Primer
catttcctcccctccctaac

SEQ ID NO: 24836 - DNA, 22 bp, Artificial Sequence
  ALK Reverse Primer
aaatgatcagcaagcataatgg

SEQ ID NO: 24837 - DNA, 20 bp, Artificial Sequence
  ALK Reverse Primer
ctaggggaatgaaccaagca

SEQ ID NO: 24838 - DNA, 21 bp, Artificial Sequence
  ALK Reverse Primer
gcacttacccactaccacctg

SEQ ID NO: 24839 - DNA, 20 bp, Artificial Sequence
  ALK Reverse Primer
caagctgaccattgggtctt

SEQ ID NO: 24840 - DNA, 20 bp, Artificial Sequence
  ALK Reverse Primer
aggtgaaggaagtgtgggtg

SEQ ID NO: 24841 - DNA, 20 bp, Artificial Sequence
  ALK Reverse Primer
agggtcttcactggggagtt

SEQ ID NO: 24842 - DNA, 20 bp, Artificial Sequence
  ALK Reverse Primer
ggagccaatgacttggacat

SEQ ID NO: 24843 - DNA, 20 bp, Artificial Sequence
  ALK Reverse Primer
ggcagagggagtaatgacca

SEQ ID NO: 24844 - DNA, 20 bp, Artificial Sequence
  ALK Reverse Primer
acaacagtgcaaggaactgg

SEQ ID NO: 24845 - DNA, 20 bp, Artificial Sequence
  ALK Reverse Primer
caggagactatgtgggcctg

SEQ ID NO: 24846 - DNA, 20 bp, Artificial Sequence
  ALK Reverse Primer
gtttgtgtgaaaaggggcat

SEQ ID NO: 24847 - DNA, 22 bp, Artificial Sequence
  ALK Reverse Primer
tgtggagcacacttacagatga

SEQ ID NO: 24848 - DNA, 20 bp, Artificial Sequence
  ALK Reverse Primer
ggaagggagaattaggaggg

SEQ ID NO: 24849 - DNA, 20 bp, Artificial Sequence
  ALK Reverse Primer
tttacaaggcaacagccctc

SEQ ID NO: 24850 - DNA, 20 bp, Artificial Sequence
  ALK Reverse Primer
aaggacagagtccacaagcc

SEQ ID NO: 24851 - DNA, 20 bp, Artificial Sequence
  ALK Reverse Primer
ggatgtggagtttgattccc

SEQ ID NO: 24852 - DNA, 23 bp, Artificial Sequence
  ALK Reverse Primer
aacagagaaacctgaaagctctg

SEQ ID NO: 24853 - DNA, 20 bp, Artificial Sequence
  ALK Reverse Primer
tctggagagcatcagcattg

SEQ ID NO: 24854 - DNA, 20 bp, Artificial Sequence
  ALK Reverse Primer
tccttagggattccagcctt

SEQ ID NO: 24855 - DNA, 20 bp, Artificial Sequence
  ALK Reverse Primer
gaagcctttgaattgggtga

SEQ ID NO: 24856 - DNA, 20 bp, Artificial Sequence
  ALK Reverse Primer
ggctgttcccttgcatacat

SEQ ID NO: 24857 - DNA, 20 bp, Artificial Sequence
  ALK Reverse Primer
tgcttcagcattcttccctt

SEQ ID NO: 24858 - DNA, 20 bp, Artificial Sequence
  ALK Reverse Primer
ggagaaggagttggggaaag

SEQ ID NO: 24859 - DNA, 20 bp, Artificial Sequence
  ALK Reverse Primer
ctttgctcctgcctgacatt

SEQ ID NO: 24860 - DNA, 20 bp, Artificial Sequence
  ALK Reverse Primer
cacggagtctccaagatggt

SEQ ID NO: 24861 - DNA, 20 bp, Artificial Sequence
  ALK Reverse Primer
cctcaaagggtgatctccag

SEQ ID NO: 24862 - DNA, 22 bp, Artificial Sequence
  ALK Reverse Primer
tgtcaaagtaattgatgagggc

SEQ ID NO: 24863 - DNA, 20 bp, Artificial Sequence
  ALK Reverse Primer
attcagcccctaccagcatt

SEQ ID NO: 24864 - DNA, 20 bp, Artificial Sequence
  ALK Reverse Primer
ccctggactcagctcagaat

SEQ ID NO: 24865 - DNA, 20 bp, Artificial Sequence
  ALK Reverse Primer
cctatgacccagtctccagc

SEQ ID NO: 24866 - DNA, 20 bp, Artificial Sequence
  ALK Reverse Primer
agtatgtgtgttgggggtgg

SEQ ID NO: 24867 - DNA, 20 bp, Artificial Sequence
  ALK Reverse Primer
cctgcctgtgggaagaaata

SEQ ID NO: 24868 - DNA, 20 bp, Artificial Sequence
  ALK Reverse Primer
agcagaagagggagacacca

SEQ ID NO: 24869 - DNA, 20 bp, Artificial Sequence
  ALK Reverse Primer
agtccaggttttgcttccct

SEQ ID NO: 24870 - DNA, 20 bp, Artificial Sequence
  ALK Reverse Primer
gagtttctgtccaccccaaa

SEQ ID NO: 24871 - DNA, 20 bp, Artificial Sequence
  ALK Reverse Primer
agtgacccaaagtgactggc

SEQ ID NO: 24872 - DNA, 20 bp, Artificial Sequence
  ALK Reverse Primer
ggcaccttaccatagctcca

SEQ ID NO: 24873 - DNA, 22 bp, Artificial Sequence
  ALK Reverse Primer
tgcagcacacataattcagaaa

SEQ ID NO: 24874 - DNA, 20 bp, Artificial Sequence
  ALK Reverse Primer
catctctttaaggggagggg

SEQ ID NO: 24875 - DNA, 20 bp, Artificial Sequence
  ALK Reverse Primer
cctggaagcctcacctactg

SEQ ID NO: 24876 - DNA, 20 bp, Artificial Sequence
  ALK Reverse Primer
aataactttggtccagcccc

SEQ ID NO: 24877 - DNA, 20 bp, Artificial Sequence
  ALK Reverse Primer
atttcatgtcccgaaagtgg

SEQ ID NO: 24878 - DNA, 20 bp, Artificial Sequence
  ALK Reverse Primer
ttcctctgaacaaattgggc

SEQ ID NO: 24879 - DNA, 20 bp, Artificial Sequence
  ALK Reverse Primer
gaccccaaaggaaagaaagc

SEQ ID NO: 24880 - DNA, 20 bp, Artificial Sequence
  ALK Reverse Primer
acaaggagccagagaggagc

SEQ ID NO: 24881 - DNA, 20 bp, Artificial Sequence
  ALK Reverse Primer
tgaaaatgcaatgagccaga

SEQ ID NO: 24882 - DNA, 20 bp, Artificial Sequence
  ALK Reverse Primer
ttacattggcctctgttggg

SEQ ID NO: 24883 - DNA, 20 bp, Artificial Sequence
  ALK Reverse Primer
cacaaatggccttgcaataa

SEQ ID NO: 24884 - DNA, 20 bp, Artificial Sequence
  ALK Reverse Primer
tttctcttgggaggaagctg

SEQ ID NO: 24885 - DNA, 20 bp, Artificial Sequence
  ALK Reverse Primer
taggcccgtggtttagtctg

SEQ ID NO: 24886 - DNA, 22 bp, Artificial Sequence
  ALK Reverse Primer
tggaccaagaattttctttcaa

SEQ ID NO: 24887 - DNA, 21 bp, Artificial Sequence
  ALK Reverse Primer
ttgcctgattcattgtctgtt

SEQ ID NO: 24888 - DNA, 20 bp, Artificial Sequence
  ALK Reverse Primer
ctttttgccctctccttgtg

SEQ ID NO: 24889 - DNA, 20 bp, Artificial Sequence
  ALK Reverse Primer
ttggaatgccattttcatca

SEQ ID NO: 24890 - DNA, 20 bp, Artificial Sequence
  ALK Reverse Primer
cccagactttattgggcaga

SEQ ID NO: 24891 - DNA, 20 bp, Artificial Sequence
  ALK Reverse Primer
gaggatagactggtgggcag

SEQ ID NO: 24892 - DNA, 21 bp, Artificial Sequence
  ALK Reverse Primer
agtacctgctatgttccaggc

SEQ ID NO: 24893 - DNA, 20 bp, Artificial Sequence
  ALK Reverse Primer
gggaatttcaggtcaagggt

SEQ ID NO: 24894 - DNA, 20 bp, Artificial Sequence
  ALK Reverse Primer
tgccagacaaagttgattgc

SEQ ID NO: 24895 - DNA, 20 bp, Artificial Sequence
  ALK Reverse Primer
tcctgtttgggagacactga

SEQ ID NO: 24896 - DNA, 20 bp, Artificial Sequence
  ALK Reverse Primer
tttgctggtagggaaggttg

SEQ ID NO: 24897 - DNA, 20 bp, Artificial Sequence
  ALK Reverse Primer
caatgaacagcagcaagagg

SEQ ID NO: 24898 - DNA, 21 bp, Artificial Sequence
  ALK Reverse Primer
tgcagagcagacactcaagaa

SEQ ID NO: 24899 - DNA, 20 bp, Artificial Sequence
  ALK Reverse Primer
tggatcaactgggttctgtg

SEQ ID NO: 24900 - DNA, 20 bp, Artificial Sequence
  ALK Reverse Primer
gagcatccataattgcccag

SEQ ID NO: 24901 - DNA, 20 bp, Artificial Sequence
  ALK Reverse Primer
gcccctgtttaatcccctta

SEQ ID NO: 24902 - DNA, 20 bp, Artificial Sequence
  ALK Reverse Primer
gtggtgctgctctgtcttga

SEQ ID NO: 24903 - DNA, 23 bp, Artificial Sequence
  ALK Reverse Primer
aaaattcttttgaatggggataa

SEQ ID NO: 24904 - DNA, 21 bp, Artificial Sequence
  ALK Reverse Primer
tgtggagctgtctttttgctt

SEQ ID NO: 24905 - DNA, 20 bp, Artificial Sequence
  ALK Reverse Primer
tgtcttcagaggggtcttgg

SEQ ID NO: 24906 - DNA, 20 bp, Artificial Sequence
  ALK Reverse Primer
ggttcaaatctccaaagcca

SEQ ID NO: 24907 - DNA, 20 bp, Artificial Sequence
  ALK Reverse Primer
gagagagcctgaaggtgctg

SEQ ID NO: 24908 - DNA, 20 bp, Artificial Sequence
  ALK Reverse Primer
gaggactgatggggacttca

SEQ ID NO: 24909 - DNA, 20 bp, Artificial Sequence
  ALK Reverse Primer
ggccaaatacctggcataaa

SEQ ID NO: 24910 - DNA, 20 bp, Artificial Sequence
  ALK Reverse Primer
ttggaattcaccaggaaagc

SEQ ID NO: 24911 - DNA, 20 bp, Artificial Sequence
  ALK Reverse Primer
ctggctaggatgcagtaggc

SEQ ID NO: 24912 - DNA, 25 bp, Artificial Sequence
  ALK Reverse Primer
tgaataatatggggaaatatttgga

SEQ ID NO: 24913 - DNA, 20 bp, Artificial Sequence
  ALK Reverse Primer
cagctctagcccctgtgttc

SEQ ID NO: 24914 - DNA, 20 bp, Artificial Sequence
  ALK Reverse Primer
tgttgtatgccccattggta

SEQ ID NO: 24915 - DNA, 20 bp, Artificial Sequence
  ALK Reverse Primer
gccaccctgaagttcatctc

SEQ ID NO: 24916 - DNA, 20 bp, Artificial Sequence
  ALK Reverse Primer
catgtgtatgggtttgccac

SEQ ID NO: 24917 - DNA, 20 bp, Artificial Sequence
  ALK Reverse Primer
tagcagggacctgagtcacc

SEQ ID NO: 24918 - DNA, 20 bp, Artificial Sequence
  ALK Reverse Primer
tttagcccactatgccttgg

SEQ ID NO: 24919 - DNA, 20 bp, Artificial Sequence
  ALK Reverse Primer
cacacgcagaaaagatggaa

SEQ ID NO: 24920 - DNA, 20 bp, Artificial Sequence
  ALK Reverse Primer
accagaaaaaggcagcaaga

SEQ ID NO: 24921 - DNA, 21 bp, Artificial Sequence
  ALK Reverse Primer
aacaacctgtccattctgcac

SEQ ID NO: 24922 - DNA, 20 bp, Artificial Sequence
  ALK Reverse Primer
tctggggtctaatggagtgg

SEQ ID NO: 24923 - DNA, 25 bp, Artificial Sequence
  ALK Reverse Primer
aatcaggattggaatatctgttttt

SEQ ID NO: 24924 - DNA, 20 bp, Artificial Sequence
  ALK Reverse Primer
tggtgacctgtttctcctcc

SEQ ID NO: 24925 - DNA, 20 bp, Artificial Sequence
  ALK Reverse Primer
aggcatagctgggcttgtaa

SEQ ID NO: 24926 - DNA, 22 bp, Artificial Sequence
  ALK Reverse Primer
ttccatttcattgggtaatgcc

SEQ ID NO: 24927 - DNA, 22 bp, Artificial Sequence
  ALK Reverse Primer
cactttgatacatgtggctgtg

SEQ ID NO: 24928 - DNA, 20 bp, Artificial Sequence
  ALK Reverse Primer
tgcattctcaccaccaaaaa

SEQ ID NO: 24929 - DNA, 22 bp, Artificial Sequence
  ALK Reverse Primer
tgtgtgtgtgtaggtgagtgct

SEQ ID NO: 24930 - DNA, 20 bp, Artificial Sequence
  ALK Reverse Primer
gccccaagatcacacagaat

SEQ ID NO: 24931 - DNA, 20 bp, Artificial Sequence
  ALK Reverse Primer
cagggcctaggaaaggtagg

SEQ ID NO: 24932 - DNA, 20 bp, Artificial Sequence
  ALK Reverse Primer
cgttctaaggagatgcccag

SEQ ID NO: 24933 - DNA, 20 bp, Artificial Sequence
  ALK Reverse Primer
ctcatgggtttcttgggaag

SEQ ID NO: 24934 - DNA, 20 bp, Artificial Sequence
  ALK Reverse Primer
tccttacccaatgaccctcc

SEQ ID NO: 24935 - DNA, 20 bp, Artificial Sequence
  ALK Reverse Primer
ttgcatcttggcatcttctg

SEQ ID NO: 24936 - DNA, 20 bp, Artificial Sequence
  ALK Reverse Primer
aattgtcttggagattgggg

SEQ ID NO: 24937 - DNA, 20 bp, Artificial Sequence
  ALK Reverse Primer
agcagctgaggagcagaaag

SEQ ID NO: 24938 - DNA, 20 bp, Artificial Sequence
  ALK Reverse Primer
acatttcatggctacgcctc

SEQ ID NO: 24939 - DNA, 20 bp, Artificial Sequence
  ALK Reverse Primer
caggcaggacacaactcaga

SEQ ID NO: 24940 - DNA, 20 bp, Artificial Sequence
  ALK Reverse Primer
ggtgttttaggcaagtccca

SEQ ID NO: 24941 - DNA, 20 bp, Artificial Sequence
  ALK Reverse Primer
tcactctctgggtctgcctt

SEQ ID NO: 24942 - DNA, 22 bp, Artificial Sequence
  ALK Reverse Primer
aaaatgggcctgacatttagaa

SEQ ID NO: 24943 - DNA, 20 bp, Artificial Sequence
  ALK Reverse Primer
tcagctggcagatcttttcc

SEQ ID NO: 24944 - DNA, 20 bp, Artificial Sequence
  ALK Reverse Primer
caagtccttgtttaggggca

SEQ ID NO: 24945 - DNA, 20 bp, Artificial Sequence
  ALK Reverse Primer
actgggtatgtctttgggca

SEQ ID NO: 24946 - DNA, 20 bp, Artificial Sequence
  ALK Reverse Primer
ccctattccccttttgtggt

SEQ ID NO: 24947 - DNA, 20 bp, Artificial Sequence
  ALK Reverse Primer
gctgctggtcctctaccttg

SEQ ID NO: 24948 - DNA, 20 bp, Artificial Sequence
  ALK Reverse Primer
acacgccttcacagaagtcc

SEQ ID NO: 24949 - DNA, 20 bp, Artificial Sequence
  ALK Reverse Primer
gcctcaggactcacaggaag

SEQ ID NO: 24950 - DNA, 20 bp, Artificial Sequence
  ALK Reverse Primer
tttaagtgagtggcaagccc

SEQ ID NO: 24951 - DNA, 20 bp, Artificial Sequence
  ALK Reverse Primer
tcacagagctgacaaatggc

SEQ ID NO: 24952 - DNA, 20 bp, Artificial Sequence
  ALK Reverse Primer
ggtgttccctgaagaggtga

SEQ ID NO: 24953 - DNA, 20 bp, Artificial Sequence
  ALK Reverse Primer
tgctaatttctggggttcca

SEQ ID NO: 24954 - DNA, 20 bp, Artificial Sequence
  ALK Reverse Primer
agtaccagccttgcaaccag

SEQ ID NO: 24955 - DNA, 20 bp, Artificial Sequence
  ALK Reverse Primer
tgaactttcccctttgcttc

SEQ ID NO: 24956 - DNA, 20 bp, Artificial Sequence
  ALK Reverse Primer
ccagacactctggtgcctct

SEQ ID NO: 24957 - DNA, 20 bp, Artificial Sequence
  ALK Reverse Primer
agctgaaacagggcttgaaa

SEQ ID NO: 24958 - DNA, 20 bp, Artificial Sequence
  ALK Reverse Primer
gtgaccagatgttgatggca

SEQ ID NO: 24959 - DNA, 20 bp, Artificial Sequence
  ALK Reverse Primer
gctttccgtgtgtatctccc

SEQ ID NO: 24960 - DNA, 20 bp, Artificial Sequence
  ALK Reverse Primer
gtagaaggtctgtgctcggg

SEQ ID NO: 24961 - DNA, 21 bp, Artificial Sequence
  ALK Reverse Primer
gctgggatttaattcatgcag

SEQ ID NO: 24962 - DNA, 20 bp, Artificial Sequence
  ALK Reverse Primer
ccacagtggggaaaactcat

SEQ ID NO: 24963 - DNA, 20 bp, Artificial Sequence
  ALK Reverse Primer
accatagaggcaagggttca

SEQ ID NO: 24964 - DNA, 20 bp, Artificial Sequence
  ALK Reverse Primer
tgacagctttgggacatctg

SEQ ID NO: 24965 - DNA, 20 bp, Artificial Sequence
  ALK Reverse Primer
attaaagggcagggacattc

SEQ ID NO: 24966 - DNA, 20 bp, Artificial Sequence
  ALK Reverse Primer
tttgtggtcctgcgttatca

SEQ ID NO: 24967 - DNA, 20 bp, Artificial Sequence
  ALK Reverse Primer
catgtgtgatacccccaaca

SEQ ID NO: 24968 - DNA, 20 bp, Artificial Sequence
  ALK Reverse Primer
aggtgagcaccacttggttt

SEQ ID NO: 24969 - DNA, 20 bp, Artificial Sequence
  ALK Reverse Primer
taacagaggcccaggaacac

SEQ ID NO: 24970 - DNA, 20 bp, Artificial Sequence
  ALK Reverse Primer
tggctccttagtgcttgctt

SEQ ID NO: 24971 - DNA, 20 bp, Artificial Sequence
  ALK Reverse Primer
caggccaggtctttttgtgt

SEQ ID NO: 24972 - DNA, 20 bp, Artificial Sequence
  ALK Reverse Primer
acctatccagttcaggggct

SEQ ID NO: 24973 - DNA, 20 bp, Artificial Sequence
  ALK Reverse Primer
caaagatgagctttccctgc

SEQ ID NO: 24974 - DNA, 20 bp, Artificial Sequence
  ALK Reverse Primer
gcccatatgagcaggagaaa

SEQ ID NO: 24975 - DNA, 20 bp, Artificial Sequence
  ALK Reverse Primer
gcgcccactaatttcatcat

SEQ ID NO: 24976 - DNA, 20 bp, Artificial Sequence
  ALK Reverse Primer
ctaggcctctgttgggtgag

SEQ ID NO: 24977 - DNA, 20 bp, Artificial Sequence
  ALK Reverse Primer
catacctttcaactgccgtg

SEQ ID NO: 24978 - DNA, 20 bp, Artificial Sequence
  ALK Reverse Primer
caccaccatcaccatctctg

SEQ ID NO: 24979 - DNA, 20 bp, Artificial Sequence
  ALK Reverse Primer
aaaatgagggtgaaatggca

SEQ ID NO: 24980 - DNA, 20 bp, Artificial Sequence
  ALK Reverse Primer
tttgctcccaaagtcattca

SEQ ID NO: 24981 - DNA, 20 bp, Artificial Sequence
  ALK Reverse Primer
aagcttccagtccaaagcct

SEQ ID NO: 24982 - DNA, 20 bp, Artificial Sequence
  ALK Reverse Primer
tcaggaggctgcctttacat

SEQ ID NO: 24983 - DNA, 20 bp, Artificial Sequence
  ALK Reverse Primer
ctctgtctcccagtgacgct

SEQ ID NO: 24984 - DNA, 20 bp, Artificial Sequence
  ALK Reverse Primer
catgccttctccttctcctg

SEQ ID NO: 24985 - DNA, 20 bp, Artificial Sequence
  ALK Reverse Primer
atggccttggtcagaacatt

SEQ ID NO: 24986 - DNA, 20 bp, Artificial Sequence
  ALK Reverse Primer
agtgcagtttcagccctctc

SEQ ID NO: 24987 - DNA, 20 bp, Artificial Sequence
  ALK Reverse Primer
aggcagtgcatgatcatttg

SEQ ID NO: 24988 - DNA, 20 bp, Artificial Sequence
  ALK Reverse Primer
ctgggctcagtttctgcttc

SEQ ID NO: 24989 - DNA, 20 bp, Artificial Sequence
  ALK Reverse Primer
ggtacccaggccagagattt

SEQ ID NO: 24990 - DNA, 20 bp, Artificial Sequence
  ALK Reverse Primer
ccctttcagtgcatttcctc

SEQ ID NO: 24991 - DNA, 20 bp, Artificial Sequence
  ALK Reverse Primer
cagctgcaaaatgaggacaa

SEQ ID NO: 24992 - DNA, 20 bp, Artificial Sequence
  ALK Reverse Primer
ttcccacttgccctattctg

SEQ ID NO: 24993 - DNA, 20 bp, Artificial Sequence
  ALK Reverse Primer
catctgcttggttcctcaca

SEQ ID NO: 24994 - DNA, 20 bp, Artificial Sequence
  ALK Reverse Primer
gcctggcaagttattggtgt

SEQ ID NO: 24995 - DNA, 20 bp, Artificial Sequence
  ALK Reverse Primer
ggctttgctttccttgatcc

SEQ ID NO: 24996 - DNA, 20 bp, Artificial Sequence
  ALK Reverse Primer
aatggattgcttctgatggc

SEQ ID NO: 24997 - DNA, 20 bp, Artificial Sequence
  ALK Reverse Primer
ctggagctgaagctgaggac

SEQ ID NO: 24998 - DNA, 20 bp, Artificial Sequence
  ALK Reverse Primer
tgtggaagcatatggggaat

SEQ ID NO: 24999 - DNA, 20 bp, Artificial Sequence
  ALK Reverse Primer
acgggaagaagaaggtggag

SEQ ID NO: 25000 - DNA, 20 bp, Artificial Sequence
  ALK Reverse Primer
gttcctaagcaagtgctgcc

SEQ ID NO: 25001 - DNA, 25 bp, Artificial Sequence
  ALK Reverse Primer
tggttttccaagtaagaaaagtcag

SEQ ID NO: 25002 - DNA, 20 bp, Artificial Sequence
  ALK Reverse Primer
ttgttcaggggagagattgg

SEQ ID NO: 25003 - DNA, 20 bp, Artificial Sequence
  ALK Reverse Primer
atgcgagatgggaaaagatg

SEQ ID NO: 25004 - DNA, 20 bp, Artificial Sequence
  ALK Reverse Primer
atagcgaagcagctctctgg

SEQ ID NO: 25005 - DNA, 19 bp, Artificial Sequence
  ALK Reverse Primer
aacatgcttgccagtgagc

SEQ ID NO: 25006 - DNA, 20 bp, Artificial Sequence
  ALK Reverse Primer
gcccatcaccgctaactcta

SEQ ID NO: 25007 - DNA, 20 bp, Artificial Sequence
  ALK Reverse Primer
taattccatccaaattccgc

SEQ ID NO: 25008 - DNA, 20 bp, Artificial Sequence
  ALK Reverse Primer
ggggtacatgctttcattgg

SEQ ID NO: 25009 - DNA, 20 bp, Artificial Sequence
  ALK Reverse Primer
ttgagctgggcctttaagaa

SEQ ID NO: 25010 - DNA, 20 bp, Artificial Sequence
  ALK Reverse Primer
cctgcaaagcatgtcctaca

SEQ ID NO: 25011 - DNA, 20 bp, Artificial Sequence
  ALK Reverse Primer
tgcgggtgtgttaagaatca

SEQ ID NO: 25012 - DNA, 20 bp, Artificial Sequence
  ALK Reverse Primer
catgtctggagactcctggg

SEQ ID NO: 25013 - DNA, 20 bp, Artificial Sequence
  ALK Reverse Primer
atgtgaccttgggcatttgt

SEQ ID NO: 25014 - DNA, 20 bp, Artificial Sequence
  ALK Reverse Primer
ccctgatggaaggtgtgtgt

SEQ ID NO: 25015 - DNA, 20 bp, Artificial Sequence
  ALK Reverse Primer
agttcagtcatggtgagggg

SEQ ID NO: 25016 - DNA, 20 bp, Artificial Sequence
  ALK Reverse Primer
caatcaggctgttggcctat

SEQ ID NO: 25017 - DNA, 20 bp, Artificial Sequence
  ALK Reverse Primer
gctaccttctcctgtggtgg

SEQ ID NO: 25018 - DNA, 20 bp, Artificial Sequence
  ALK Reverse Primer
gttaagggcctcagtgcaag

SEQ ID NO: 25019 - DNA, 20 bp, Artificial Sequence
  ALK Reverse Primer
ctggaggcatctgtcatcct

SEQ ID NO: 25020 - DNA, 20 bp, Artificial Sequence
  ALK Reverse Primer
ctgcaagaagagttcctggg

SEQ ID NO: 25021 - DNA, 20 bp, Artificial Sequence
  ALK Reverse Primer
ttatggcctttttaccgtgg

SEQ ID NO: 25022 - DNA, 20 bp, Artificial Sequence
  ALK Reverse Primer
gcactcaagatgtgctgcat

SEQ ID NO: 25023 - DNA, 20 bp, Artificial Sequence
  ALK Reverse Primer
gtaggcctgcccttcctaag

SEQ ID NO: 25024 - DNA, 21 bp, Artificial Sequence
  ALK Reverse Primer
tgtcattggccacagagatag

SEQ ID NO: 25025 - DNA, 20 bp, Artificial Sequence
  ALK Reverse Primer
cctttcactgcaagcaacct

SEQ ID NO: 25026 - DNA, 20 bp, Artificial Sequence
  ALK Reverse Primer
tttctgaggccaacgtctct

SEQ ID NO: 25027 - DNA, 21 bp, Artificial Sequence
  ALK Reverse Primer
cagatgaggctacacacagca

SEQ ID NO: 25028 - DNA, 20 bp, Artificial Sequence
  ALK Reverse Primer
gacagagtgccacttgcaga

SEQ ID NO: 25029 - DNA, 20 bp, Artificial Sequence
  ALK Reverse Primer
tcctgactgcttctcttggg

SEQ ID NO: 25030 - DNA, 20 bp, Artificial Sequence
  ALK Reverse Primer
gaggctgggtttggttatga

SEQ ID NO: 25031 - DNA, 20 bp, Artificial Sequence
  ALK Reverse Primer
tgaattttgggggaaccata

SEQ ID NO: 25032 - DNA, 20 bp, Artificial Sequence
  ALK Reverse Primer
agagtgccccactagccaat

SEQ ID NO: 25033 - DNA, 20 bp, Artificial Sequence
  ALK Reverse Primer
aggccagcctgacatctaaa

SEQ ID NO: 25034 - DNA, 20 bp, Artificial Sequence
  ALK Reverse Primer
tccaagacagctcctccaac

SEQ ID NO: 25035 - DNA, 20 bp, Artificial Sequence
  ALK Reverse Primer
gctgcttgttctccaagtcc

SEQ ID NO: 25036 - DNA, 25 bp, Artificial Sequence
  ALK Reverse Primer
tgaaaacgttagacagtctcttctc

SEQ ID NO: 25037 - DNA, 20 bp, Artificial Sequence
  ALK Reverse Primer
ttttctttttgagcatgggg

SEQ ID NO: 25038 - DNA, 21 bp, Artificial Sequence
  ALK Reverse Primer
atctatctcattgccctcagc

SEQ ID NO: 25039 - DNA, 20 bp, Artificial Sequence
  ALK Reverse Primer
ccaaatcagaaccccctgta

SEQ ID NO: 25040 - DNA, 26 bp, Artificial Sequence
  ALK Reverse Primer
cacctggtacataatgagtatgcaat

SEQ ID NO: 25041 - DNA, 20 bp, Artificial Sequence
  ALK Reverse Primer
ccttccaggcattttctttg

SEQ ID NO: 25042 - DNA, 20 bp, Artificial Sequence
  ALK Reverse Primer
tggggtaaggggagtagaaa

SEQ ID NO: 25043 - DNA, 21 bp, Artificial Sequence
  ALK Reverse Primer
tggaacaaggaacatcactgg

SEQ ID NO: 25044 - DNA, 20 bp, Artificial Sequence
  ALK Reverse Primer
cctcccaatctgtttcatgc

SEQ ID NO: 25045 - DNA, 20 bp, Artificial Sequence
  ALK Reverse Primer
tggattccctagtttgccag

SEQ ID NO: 25046 - DNA, 20 bp, Artificial Sequence
  ALK Reverse Primer
aagatctgggtttcagggct

SEQ ID NO: 25047 - DNA, 20 bp, Artificial Sequence
  ALK Reverse Primer
gcatccatttggtccttctc

SEQ ID NO: 25048 - DNA, 20 bp, Artificial Sequence
  ALK Reverse Primer
agagatggattcatgggctg

SEQ ID NO: 25049 - DNA, 20 bp, Artificial Sequence
  ALK Reverse Primer
tggcatggtgttcctatcat

SEQ ID NO: 25050 - DNA, 20 bp, Artificial Sequence
  ALK Reverse Primer
gagtcaaaacccatgcttgc

SEQ ID NO: 25051 - DNA, 21 bp, Artificial Sequence
  ALK Reverse Primer
tgcagtagctctctgaggttc

SEQ ID NO: 25052 - DNA, 20 bp, Artificial Sequence
  ALK Reverse Primer
cccttctttcatccgttcct

SEQ ID NO: 25053 - DNA, 21 bp, Artificial Sequence
  ALK Reverse Primer
ttgccacctaatattggcact

SEQ ID NO: 25054 - DNA, 20 bp, Artificial Sequence
  ALK Reverse Primer
agtcacgtaactgccagcct

SEQ ID NO: 25055 - DNA, 20 bp, Artificial Sequence
  ALK Reverse Primer
agcgaaggctgtcatgagtt

SEQ ID NO: 25056 - DNA, 20 bp, Artificial Sequence
  ALK Reverse Primer
cacagcctgtaacagaggca

SEQ ID NO: 25057 - DNA, 20 bp, Artificial Sequence
  ALK Reverse Primer
cacctggctagaatgggaga

SEQ ID NO: 25058 - DNA, 20 bp, Artificial Sequence
  ALK Reverse Primer
gcctagagcctggccattat

SEQ ID NO: 25059 - DNA, 20 bp, Artificial Sequence
  ALK Reverse Primer
tccaggtttccaagtcgaac

SEQ ID NO: 25060 - DNA, 20 bp, Artificial Sequence
  ALK Reverse Primer
tcaaacaggaatccgtcctc

SEQ ID NO: 25061 - DNA, 20 bp, Artificial Sequence
  ALK Reverse Primer
taaaatgggcttggttggag

SEQ ID NO: 25062 - DNA, 20 bp, Artificial Sequence
  ALK Reverse Primer
gcaagtagctcctcctgtgg

SEQ ID NO: 25063 - DNA, 20 bp, Artificial Sequence
  ALK Reverse Primer
catctttggcatacgtggtg

SEQ ID NO: 25064 - DNA, 20 bp, Artificial Sequence
  ALK Reverse Primer
ggtgttgtaccagcagggat

SEQ ID NO: 25065 - DNA, 20 bp, Artificial Sequence
  ALK Reverse Primer
tgatgggacatgctgctaag

SEQ ID NO: 25066 - DNA, 24 bp, Artificial Sequence
  ALK Reverse Primer
caagtaagcaattgtcattttcca

SEQ ID NO: 25067 - DNA, 20 bp, Artificial Sequence
  ALK Reverse Primer
taagggaaatgctggaggtg

SEQ ID NO: 25068 - DNA, 20 bp, Artificial Sequence
  ALK Reverse Primer
ggcttgcatttgcctttcta

SEQ ID NO: 25069 - DNA, 20 bp, Artificial Sequence
  ALK Reverse Primer
aaatgggctgttttccctct

SEQ ID NO: 25070 - DNA, 24 bp, Artificial Sequence
  ALK Reverse Primer
aaaggaaacttccatttttattgg

SEQ ID NO: 25071 - DNA, 20 bp, Artificial Sequence
  ALK Reverse Primer
aatggtctctggggctcttt

SEQ ID NO: 25072 - DNA, 20 bp, Artificial Sequence
  ALK Reverse Primer
ccagaggagacaggtaggca

SEQ ID NO: 25073 - DNA, 20 bp, Artificial Sequence
  ALK Reverse Primer
ccaagggccatatgcttaga

SEQ ID NO: 25074 - DNA, 20 bp, Artificial Sequence
  ALK Reverse Primer
ttgctttggggactgagaac

SEQ ID NO: 25075 - DNA, 20 bp, Artificial Sequence
  ALK Reverse Primer
ctgctttcaagggtctggag

SEQ ID NO: 25076 - DNA, 20 bp, Artificial Sequence
  ALK Reverse Primer
acatgaagacgtggtggaca

SEQ ID NO: 25077 - DNA, 20 bp, Artificial Sequence
  ALK Reverse Primer
ggctgggtctgagtctgaag

SEQ ID NO: 25078 - DNA, 20 bp, Artificial Sequence
  ALK Reverse Primer
ctggttccttgcacagatca

SEQ ID NO: 25079 - DNA, 20 bp, Artificial Sequence
  ALK Reverse Primer
ctgggtaatggagagccaaa

SEQ ID NO: 25080 - DNA, 20 bp, Artificial Sequence
  ALK Reverse Primer
cacatctgtatagtgcgcgg

SEQ ID NO: 25081 - DNA, 20 bp, Artificial Sequence
  ALK Reverse Primer
cttcaaactgccctgtcctc

SEQ ID NO: 25082 - DNA, 20 bp, Artificial Sequence
  ALK Reverse Primer
ggcatctcctgagaccaaga

SEQ ID NO: 25083 - DNA, 20 bp, Artificial Sequence
  ALK Reverse Primer
gactaaagagggctggtccc

SEQ ID NO: 25084 - DNA, 20 bp, Artificial Sequence
  ALK Reverse Primer
gctaacgttttccatcctgg

SEQ ID NO: 25085 - DNA, 20 bp, Artificial Sequence
  ALK Reverse Primer
gtcctctcattggcaagctc

SEQ ID NO: 25086 - DNA, 20 bp, Artificial Sequence
  ALK Reverse Primer
cacaactgaggtgcatctgg

SEQ ID NO: 25087 - DNA, 20 bp, Artificial Sequence
  ALK Reverse Primer
ttaaaaggtccggaaggtcc

SEQ ID NO: 25088 - DNA, 20 bp, Artificial Sequence
  ALK Reverse Primer
gcttgcttcagagtcatgga

SEQ ID NO: 25089 - DNA, 20 bp, Artificial Sequence
  ALK Reverse Primer
ggcaccctatgcctagaaca

SEQ ID NO: 25090 - DNA, 20 bp, Artificial Sequence
  ALK Reverse Primer
gtatctcagctccgccactc

SEQ ID NO: 25091 - DNA, 20 bp, Artificial Sequence
  ALK Reverse Primer
tttgaaggcctgacagaggt

SEQ ID NO: 25092 - DNA, 20 bp, Artificial Sequence
  ALK Reverse Primer
actgacaagcagggaggaga

SEQ ID NO: 25093 - DNA, 20 bp, Artificial Sequence
  ALK Reverse Primer
gcacacatgcacacacacat

SEQ ID NO: 25094 - DNA, 20 bp, Artificial Sequence
  ALK Reverse Primer
cgctggctacaaatttcaca

SEQ ID NO: 25095 - DNA, 22 bp, Artificial Sequence
  ALK Reverse Primer
tgtgacaaaaccaaacaaacaa

SEQ ID NO: 25096 - DNA, 20 bp, Artificial Sequence
  ALK Reverse Primer
ctggaggagcttagccaatg

SEQ ID NO: 25097 - DNA, 20 bp, Artificial Sequence
  ALK Reverse Primer
gttctctgcatggttgggtt

SEQ ID NO: 25098 - DNA, 20 bp, Artificial Sequence
  ALK Reverse Primer
aggcaggcatgaacagaact

SEQ ID NO: 25099 - DNA, 20 bp, Artificial Sequence
  ALK Reverse Primer
catcacagagtggcaggaaa

SEQ ID NO: 25100 - DNA, 20 bp, Artificial Sequence
  ALK Reverse Primer
ttgctttccagtgcagactc

SEQ ID NO: 25101 - DNA, 20 bp, Artificial Sequence
  ALK Reverse Primer
ggactcgttactggaaccca

SEQ ID NO: 25102 - DNA, 20 bp, Artificial Sequence
  ALK Reverse Primer
ccccctttaccgattgactt

SEQ ID NO: 25103 - DNA, 20 bp, Artificial Sequence
  ALK Reverse Primer
tcagatggaccaagggctac

SEQ ID NO: 25104 - DNA, 20 bp, Artificial Sequence
  ALK Reverse Primer
tctaacctccttgcatggct

SEQ ID NO: 25105 - DNA, 20 bp, Artificial Sequence
  ALK Reverse Primer
cttcagcagaggtgcatgag

SEQ ID NO: 25106 - DNA, 20 bp, Artificial Sequence
  ALK Reverse Primer
ctgagggtttgtcctcttgc

SEQ ID NO: 25107 - DNA, 20 bp, Artificial Sequence
  ALK Reverse Primer
ccccacaatcacttggagag

SEQ ID NO: 25108 - DNA, 21 bp, Artificial Sequence
  ALK Reverse Primer
aagcaagacaaagcatttcca

SEQ ID NO: 25109 - DNA, 20 bp, Artificial Sequence
  ALK Reverse Primer
gaatgaacaggaggtggtgg

SEQ ID NO: 25110 - DNA, 20 bp, Artificial Sequence
  ALK Reverse Primer
ggtttcaggtctgtcaggga

SEQ ID NO: 25111 - DNA, 20 bp, Artificial Sequence
  ALK Reverse Primer
atcacagtgcctggtgcata

SEQ ID NO: 25112 - DNA, 20 bp, Artificial Sequence
  ALK Reverse Primer
ggaaagagcactatgccagg

SEQ ID NO: 25113 - DNA, 19 bp, Artificial Sequence
  ALK Reverse Primer
aggaggcaggggagaaact

SEQ ID NO: 25114 - DNA, 20 bp, Artificial Sequence
  ALK Reverse Primer
tgctccccagaagactcact

SEQ ID NO: 25115 - DNA, 20 bp, Artificial Sequence
  ALK Reverse Primer
atttcctgaggtggattccc

SEQ ID NO: 25116 - DNA, 22 bp, Artificial Sequence
  ALK Reverse Primer
cacacacacacacacacagaca

SEQ ID NO: 25117 - DNA, 20 bp, Artificial Sequence
  ALK Reverse Primer
tctgcctgttgacatcttgg

SEQ ID NO: 25118 - DNA, 20 bp, Artificial Sequence
  ALK Reverse Primer
aacacctctgaaggaagcga

SEQ ID NO: 25119 - DNA, 20 bp, Artificial Sequence
  ALK Reverse Primer
ttagtttctcgtccctccca

SEQ ID NO: 25120 - DNA, 20 bp, Artificial Sequence
  ALK Reverse Primer
tgttgggacgtgtcatctgt

SEQ ID NO: 25121 - DNA, 20 bp, Artificial Sequence
  ALK Reverse Primer
ccctctgttgacttttccca

SEQ ID NO: 25122 - DNA, 20 bp, Artificial Sequence
  ALK Reverse Primer
ccatcccaccaatctcatct

SEQ ID NO: 25123 - DNA, 27 bp, Artificial Sequence
  ALK Reverse Primer
tttcattcaaatcaatattcagtgttt

SEQ ID NO: 25124 - DNA, 20 bp, Artificial Sequence
  ALK Reverse Primer
cgccctttaactctttcagc

SEQ ID NO: 25125 - DNA, 20 bp, Artificial Sequence
  ALK Reverse Primer
tggtaagccagtcctctgct

SEQ ID NO: 25126 - DNA, 20 bp, Artificial Sequence
  ALK Reverse Primer
ccttggaggaaactcaccaa

SEQ ID NO: 25127 - DNA, 20 bp, Artificial Sequence
  ALK Reverse Primer
ataaatctggcaccatccca

SEQ ID NO: 25128 - DNA, 20 bp, Artificial Sequence
  ALK Reverse Primer
gagtttcaaagcaacagggg

SEQ ID NO: 25129 - DNA, 20 bp, Artificial Sequence
  ALK Reverse Primer
ggaccttggtcaaggcatta

SEQ ID NO: 25130 - DNA, 20 bp, Artificial Sequence
  ALK Reverse Primer
ttacattaacccatccccga

SEQ ID NO: 25131 - DNA, 20 bp, Artificial Sequence
  ALK Reverse Primer
aggcccttttgttcaaatcc

SEQ ID NO: 25132 - DNA, 20 bp, Artificial Sequence
  ALK Reverse Primer
tttttgtagggggagggagt

SEQ ID NO: 25133 - DNA, 20 bp, Artificial Sequence
  ALK Reverse Primer
tgccttccagatgttaccct

SEQ ID NO: 25134 - DNA, 20 bp, Artificial Sequence
  ALK Reverse Primer
ccgggagctaatgagaaaca

SEQ ID NO: 25135 - DNA, 20 bp, Artificial Sequence
  ALK Reverse Primer
gaggaaaatcccgactccat

SEQ ID NO: 25136 - DNA, 20 bp, Artificial Sequence
  ALK Reverse Primer
cgtaggctgggtgatgattt

SEQ ID NO: 25137 - DNA, 20 bp, Artificial Sequence
  ALK Reverse Primer
acagccagtcagtctgtccc

SEQ ID NO: 25138 - DNA, 20 bp, Artificial Sequence
  ALK Reverse Primer
aggctggactggtgtattgg

SEQ ID NO: 25139 - DNA, 20 bp, Artificial Sequence
  ALK Reverse Primer
gggaggttaaatcactgcca

SEQ ID NO: 25140 - DNA, 20 bp, Artificial Sequence
  ALK Reverse Primer
ctgcacacacacttgcacac

SEQ ID NO: 25141 - DNA, 20 bp, Artificial Sequence
  ALK Reverse Primer
ttcagcaggcacagacattg

SEQ ID NO: 25142 - DNA, 20 bp, Artificial Sequence
  ALK Reverse Primer
aggagtccgtattgctggtg

SEQ ID NO: 25143 - DNA, 20 bp, Artificial Sequence
  ALK Reverse Primer
tggagaatgaaggcacaatg

SEQ ID NO: 25144 - DNA, 20 bp, Artificial Sequence
  ALK Reverse Primer
gagttgaaaatggccctcaa

SEQ ID NO: 25145 - DNA, 20 bp, Artificial Sequence
  ALK Reverse Primer
gccctaagcactttgcattc

SEQ ID NO: 25146 - DNA, 20 bp, Artificial Sequence
  ALK Reverse Primer
tcttccttaaccagcatggg

SEQ ID NO: 25147 - DNA, 20 bp, Artificial Sequence
  ALK Reverse Primer
ctaccccttgaactccctgg

SEQ ID NO: 25148 - DNA, 20 bp, Artificial Sequence
  ALK Reverse Primer
ggggaaactggcacactaga

SEQ ID NO: 25149 - DNA, 20 bp, Artificial Sequence
  ALK Reverse Primer
tcagtaccgttcatcaccca

SEQ ID NO: 25150 - DNA, 20 bp, Artificial Sequence
  ALK Reverse Primer
ggcttttgaagcttgcactc

SEQ ID NO: 25151 - DNA, 20 bp, Artificial Sequence
  ALK Reverse Primer
gatgggctgtgttccaaatc

SEQ ID NO: 25152 - DNA, 20 bp, Artificial Sequence
  ALK Reverse Primer
ggggcaccaaagaagaaaat

SEQ ID NO: 25153 - DNA, 20 bp, Artificial Sequence
  ALK Reverse Primer
gaggactggggaagaggaac

SEQ ID NO: 25154 - DNA, 20 bp, Artificial Sequence
  ALK Reverse Primer
ccctttcagtattccaggca

SEQ ID NO: 25155 - DNA, 24 bp, Artificial Sequence
  ALK Reverse Primer
aaatttacagtcactcagcatgga

SEQ ID NO: 25156 - DNA, 20 bp, Artificial Sequence
  ALK Reverse Primer
gtcctctatccccagggaac

SEQ ID NO: 25157 - DNA, 20 bp, Artificial Sequence
  ALK Reverse Primer
tctgtctcgctctctcgttg

SEQ ID NO: 25158 - DNA, 23 bp, Artificial Sequence
  ALK Reverse Primer
tgcagcatgataggtgctagata

SEQ ID NO: 25159 - DNA, 20 bp, Artificial Sequence
  ALK Reverse Primer
ctcccttctgtgtcagaggc

SEQ ID NO: 25160 - DNA, 20 bp, Artificial Sequence
  ALK Reverse Primer
aactgtgtgcctgctgtttg

SEQ ID NO: 25161 - DNA, 20 bp, Artificial Sequence
  ALK Reverse Primer
tgcaaggttgtgtgaaaggt

SEQ ID NO: 25162 - DNA, 20 bp, Artificial Sequence
  ALK Reverse Primer
cacagagagtttgctgacgg

SEQ ID NO: 25163 - DNA, 20 bp, Artificial Sequence
  ALK Reverse Primer
atgttggctgatgagtgctg

SEQ ID NO: 25164 - DNA, 20 bp, Artificial Sequence
  ALK Reverse Primer
tacacaactcctggaagccc

SEQ ID NO: 25165 - DNA, 20 bp, Artificial Sequence
  ALK Reverse Primer
ccagggaaatcctcagaaca

SEQ ID NO: 25166 - DNA, 20 bp, Artificial Sequence
  ALK Reverse Primer
ggaaaagcctgtgcattgtt

SEQ ID NO: 25167 - DNA, 20 bp, Artificial Sequence
  ALK Reverse Primer
cacccacattttcagcatca

SEQ ID NO: 25168 - DNA, 20 bp, Artificial Sequence
  ALK Reverse Primer
ggtgtctgctgcaaatgatg

SEQ ID NO: 25169 - DNA, 20 bp, Artificial Sequence
  ALK Reverse Primer
cccatgacattgtagccctt

SEQ ID NO: 25170 - DNA, 20 bp, Artificial Sequence
  ALK Reverse Primer
ttcaagagctgggtccttgt

SEQ ID NO: 25171 - DNA, 20 bp, Artificial Sequence
  ALK Reverse Primer
gttggtggtggaaggaagaa

SEQ ID NO: 25172 - DNA, 20 bp, Artificial Sequence
  ALK Reverse Primer
cctggttggctaagtgtggt

SEQ ID NO: 25173 - DNA, 22 bp, Artificial Sequence
  ALK Reverse Primer
ttcttgaggttttaatccaggc

SEQ ID NO: 25174 - DNA, 20 bp, Artificial Sequence
  ALK Reverse Primer
ctccacggccaaatgttaat

SEQ ID NO: 25175 - DNA, 20 bp, Artificial Sequence
  ALK Reverse Primer
taacccacatgcctaccctc

SEQ ID NO: 25176 - DNA, 20 bp, Artificial Sequence
  ALK Reverse Primer
gaggcttaacctggcatctg

SEQ ID NO: 25177 - DNA, 21 bp, Artificial Sequence
  ALK Reverse Primer
gcaatgtttcaaattccctca

SEQ ID NO: 25178 - DNA, 21 bp, Artificial Sequence
  ALK Reverse Primer
ttgcaacagaggagtttcaga

SEQ ID NO: 25179 - DNA, 20 bp, Artificial Sequence
  ALK Reverse Primer
cccctgaaactgagatgtcc

SEQ ID NO: 25180 - DNA, 21 bp, Artificial Sequence
  ALK Reverse Primer
caaatggtcacattttgctca

SEQ ID NO: 25181 - DNA, 25 bp, Artificial Sequence
  ALK Reverse Primer
aaagtcttagtcatctttgttggaa

SEQ ID NO: 25182 - DNA, 20 bp, Artificial Sequence
  ALK Reverse Primer
agaagggcagaaggaaaagc

SEQ ID NO: 25183 - DNA, 20 bp, Artificial Sequence
  ALK Reverse Primer
agccacagagactggatgct

SEQ ID NO: 25184 - DNA, 20 bp, Artificial Sequence
  ALK Reverse Primer
agtctctgctgggttgaagc

SEQ ID NO: 25185 - DNA, 25 bp, Artificial Sequence
  ALK Reverse Primer
caagaaacagagttatctggactgg

SEQ ID NO: 25186 - DNA, 20 bp, Artificial Sequence
  ALK Reverse Primer
tgtcctttgatgggagaagg

SEQ ID NO: 25187 - DNA, 21 bp, Artificial Sequence
  ALK Reverse Primer
tgtgcatggatatggagatga

SEQ ID NO: 25188 - DNA, 20 bp, Artificial Sequence
  ALK Reverse Primer
ccctctgggatcgtagttga

SEQ ID NO: 25189 - DNA, 20 bp, Artificial Sequence
  ALK Reverse Primer
gggctgagtgtacttggctt

SEQ ID NO: 25190 - DNA, 20 bp, Artificial Sequence
  ALK Reverse Primer
tgcggcttaaaggaagaaaa

SEQ ID NO: 25191 - DNA, 20 bp, Artificial Sequence
  ALK Reverse Primer
atctagctggtgcagctgtg

SEQ ID NO: 25192 - DNA, 20 bp, Artificial Sequence
  ALK Reverse Primer
actttgcatgttcacctccc

SEQ ID NO: 25193 - DNA, 20 bp, Artificial Sequence
  ALK Reverse Primer
agtctggttccttgcctttg

SEQ ID NO: 25194 - DNA, 20 bp, Artificial Sequence
  ALK Reverse Primer
gtagctgcagggggttgtaa

SEQ ID NO: 25195 - DNA, 20 bp, Artificial Sequence
  ALK Reverse Primer
catgcgttgggaatattgtg

SEQ ID NO: 25196 - DNA, 20 bp, Artificial Sequence
  ALK Reverse Primer
acctgttcctccctgaggtt

SEQ ID NO: 25197 - DNA, 20 bp, Artificial Sequence
  ALK Reverse Primer
ctggaaattgggaaagcaaa

SEQ ID NO: 25198 - DNA, 20 bp, Artificial Sequence
  ALK Reverse Primer
gctgtgatttctcagcctcc

SEQ ID NO: 25199 - DNA, 20 bp, Artificial Sequence
  ALK Reverse Primer
gctggcatagacacagctca

SEQ ID NO: 25200 - DNA, 20 bp, Artificial Sequence
  ALK Reverse Primer
cgtgagagtggacttgcgta

SEQ ID NO: 25201 - DNA, 21 bp, Artificial Sequence
  ALK Reverse Primer
aagcttggcatcccattattt

SEQ ID NO: 25202 - DNA, 20 bp, Artificial Sequence
  ALK Reverse Primer
ctgcccctgagtattgccta

SEQ ID NO: 25203 - DNA, 18 bp, Artificial Sequence
  ALK Reverse Primer
ctgccctgccttgtaccc

SEQ ID NO: 25204 - DNA, 20 bp, Artificial Sequence
  ALK Reverse Primer
ccatatctgctgaaggcaca

SEQ ID NO: 25205 - DNA, 20 bp, Artificial Sequence
  ALK Reverse Primer
tgaagcctggggacgtatag

SEQ ID NO: 25206 - DNA, 20 bp, Artificial Sequence
  ALK Reverse Primer
gggggtgttcctagatttcg

SEQ ID NO: 25207 - DNA, 20 bp, Artificial Sequence
  ALK Reverse Primer
caactcctctaccttccccc

SEQ ID NO: 25208 - DNA, 20 bp, Artificial Sequence
  ALK Reverse Primer
ggtgtgtgtgtatgtgcgtg

SEQ ID NO: 25209 - DNA, 20 bp, Artificial Sequence
  ALK Reverse Primer
ttttcattcaccctcccttg

SEQ ID NO: 25210 - DNA, 20 bp, Artificial Sequence
  ALK Reverse Primer
agcaaatcatcagagcctgg

SEQ ID NO: 25211 - DNA, 20 bp, Artificial Sequence
  ALK Reverse Primer
aaagcatttcccaaaccatc

SEQ ID NO: 25212 - DNA, 26 bp, Artificial Sequence
  ALK Reverse Primer
ccatagactgtttttaatttcaatgc

SEQ ID NO: 25213 - DNA, 20 bp, Artificial Sequence
  ALK Reverse Primer
cttgggatccagagcttcag

SEQ ID NO: 25214 - DNA, 20 bp, Artificial Sequence
  ALK Reverse Primer
ttgtatgctggtcatgctgg

SEQ ID NO: 25215 - DNA, 20 bp, Artificial Sequence
  ALK Reverse Primer
aagcaatccctggaaagaca

SEQ ID NO: 25216 - DNA, 21 bp, Artificial Sequence
  ALK Reverse Primer
tggaaggtccaagtacaacat

SEQ ID NO: 25217 - DNA, 21 bp, Artificial Sequence
  ALK Reverse Primer
tgaagggagtcagaccaactg

SEQ ID NO: 25218 - DNA, 20 bp, Artificial Sequence
  ALK Reverse Primer
cttcacaaacctgctggaca

SEQ ID NO: 25219 - DNA, 20 bp, Artificial Sequence
  ALK Reverse Primer
ccaccatcttgacaccatca

SEQ ID NO: 25220 - DNA, 20 bp, Artificial Sequence
  ALK Reverse Primer
aaagctccatccatgcagag

SEQ ID NO: 25221 - DNA, 20 bp, Artificial Sequence
  ALK Reverse Primer
gatcagagccaggaatggag

SEQ ID NO: 25222 - DNA, 20 bp, Artificial Sequence
  ALK Reverse Primer
ggaggcatgaagaacctgaa

SEQ ID NO: 25223 - DNA, 20 bp, Artificial Sequence
  ALK Reverse Primer
ccctcttacccaaagctggt

SEQ ID NO: 25224 - DNA, 20 bp, Artificial Sequence
  ALK Reverse Primer
gcttggtaaaaggcaaatgg

SEQ ID NO: 25225 - DNA, 20 bp, Artificial Sequence
  ALK Reverse Primer
tacagcccctagcatggagt

SEQ ID NO: 25226 - DNA, 20 bp, Artificial Sequence
  ALK Reverse Primer
gcccagactgaaatggatgt

SEQ ID NO: 25227 - DNA, 20 bp, Artificial Sequence
  ALK Reverse Primer
attatttgtgcaaggcaggg

SEQ ID NO: 25228 - DNA, 20 bp, Artificial Sequence
  ALK Reverse Primer
ccactgtgggagaaatcagg

SEQ ID NO: 25229 - DNA, 20 bp, Artificial Sequence
  ALK Reverse Primer
aactgggaggatcaccactg

SEQ ID NO: 25230 - DNA, 20 bp, Artificial Sequence
  ALK Reverse Primer
tcgactgctgtcctcacaac

SEQ ID NO: 25231 - DNA, 20 bp, Artificial Sequence
  ALK Reverse Primer
tgtgaatcccacacgagaga

SEQ ID NO: 25232 - DNA, 20 bp, Artificial Sequence
  ALK Reverse Primer
atttccagggcctcagtttt

SEQ ID NO: 25233 - DNA, 20 bp, Artificial Sequence
  ALK Reverse Primer
tctgtctgcaaatgtccctg

SEQ ID NO: 25234 - DNA, 20 bp, Artificial Sequence
  ALK Reverse Primer
tcagagctgttattgtcggc

SEQ ID NO: 25235 - DNA, 20 bp, Artificial Sequence
  ALK Reverse Primer
tactgaagctccccatgctt

SEQ ID NO: 25236 - DNA, 21 bp, Artificial Sequence
  ALK Reverse Primer
tgagatccatgaaagctgacc

SEQ ID NO: 25237 - DNA, 20 bp, Artificial Sequence
  ALK Reverse Primer
ggcagatgatccctaagcac

SEQ ID NO: 25238 - DNA, 20 bp, Artificial Sequence
  ALK Reverse Primer
aatccgggtcacatcaaaac

SEQ ID NO: 25239 - DNA, 20 bp, Artificial Sequence
  ALK Reverse Primer
gggcttcctctaacgtctca

SEQ ID NO: 25240 - DNA, 20 bp, Artificial Sequence
  ALK Reverse Primer
ccagtctcatttccctttgc

SEQ ID NO: 25241 - DNA, 20 bp, Artificial Sequence
  ALK Reverse Primer
gatgatcctgattggaggga

SEQ ID NO: 25242 - DNA, 20 bp, Artificial Sequence
  ALK Reverse Primer
ccagtcatccctctcatggt

SEQ ID NO: 25243 - DNA, 20 bp, Artificial Sequence
  ALK Reverse Primer
tggggagtctagcacaggag

SEQ ID NO: 25244 - DNA, 20 bp, Artificial Sequence
  ALK Reverse Primer
accatcacgctctgttaccc

SEQ ID NO: 25245 - DNA, 20 bp, Artificial Sequence
  ALK Reverse Primer
ctctctgagtcccatttggc

SEQ ID NO: 25246 - DNA, 20 bp, Artificial Sequence
  ALK Reverse Primer
gggaaaacagaaggtgggtt

SEQ ID NO: 25247 - DNA, 20 bp, Artificial Sequence
  ALK Reverse Primer
gtagatccttgaggggaggg

SEQ ID NO: 25248 - DNA, 20 bp, Artificial Sequence
  ALK Reverse Primer
ttccacttaatcctggctgg

SEQ ID NO: 25249 - DNA, 20 bp, Artificial Sequence
  ALK Reverse Primer
attcgccattcagtcctttg

SEQ ID NO: 25250 - DNA, 20 bp, Artificial Sequence
  ALK Reverse Primer
acttggccacatgaatttcc

SEQ ID NO: 25251 - DNA, 20 bp, Artificial Sequence
  ALK Reverse Primer
ctcttctggttcccttgctg

SEQ ID NO: 25252 - DNA, 20 bp, Artificial Sequence
  ALK Reverse Primer
cagtattccctgccttgcat

SEQ ID NO: 25253 - DNA, 20 bp, Artificial Sequence
  ALK Reverse Primer
atgggttaccaggcactgtc

SEQ ID NO: 25254 - DNA, 20 bp, Artificial Sequence
  ALK Reverse Primer
agatcaagcccaaacaccac

SEQ ID NO: 25255 - DNA, 20 bp, Artificial Sequence
  ALK Reverse Primer
gccatgagcttgggtaaaaa

SEQ ID NO: 25256 - DNA, 20 bp, Artificial Sequence
  ALK Reverse Primer
tgctgttctgagaccattgc

SEQ ID NO: 25257 - DNA, 20 bp, Artificial Sequence
  ALK Reverse Primer
cctcacatagggtttgagcc

SEQ ID NO: 25258 - DNA, 21 bp, Artificial Sequence
  ALK Reverse Primer
gtagtggacccacctcattca

SEQ ID NO: 25259 - DNA, 20 bp, Artificial Sequence
  ALK Reverse Primer
aaatgttcacccagaggctg

SEQ ID NO: 25260 - DNA, 20 bp, Artificial Sequence
  ALK Reverse Primer
tgccattggtctctttgtga

SEQ ID NO: 25261 - DNA, 21 bp, Artificial Sequence
  ALK Reverse Primer
gggctcctcttacctgaagtc

SEQ ID NO: 25262 - DNA, 20 bp, Artificial Sequence
  ALK Reverse Primer
gcactggccagacttgagtt

SEQ ID NO: 25263 - DNA, 20 bp, Artificial Sequence
  ALK Reverse Primer
cccagacagatgctcacaaa

SEQ ID NO: 25264 - DNA, 20 bp, Artificial Sequence
  ALK Reverse Primer
agggaacctcatctcccagt

SEQ ID NO: 25265 - DNA, 20 bp, Artificial Sequence
  ALK Reverse Primer
ggtttgcccctttgaaagat

SEQ ID NO: 25266 - DNA, 20 bp, Artificial Sequence
  ALK Reverse Primer
ccaatgtgctgaagaagcaa

SEQ ID NO: 25267 - DNA, 20 bp, Artificial Sequence
  ALK Reverse Primer
aggaagcaagcttctcctga

SEQ ID NO: 25268 - DNA, 20 bp, Artificial Sequence
  ALK Reverse Primer
aggcatgagggctctatgtg

SEQ ID NO: 25269 - DNA, 20 bp, Artificial Sequence
  ALK Reverse Primer
gcacctggtaagtgctccat

SEQ ID NO: 25270 - DNA, 20 bp, Artificial Sequence
  ALK Reverse Primer
ccttaccagatgtgtggcct

SEQ ID NO: 25271 - DNA, 20 bp, Artificial Sequence
  ALK Reverse Primer
ttttctgcctccagctctgt

SEQ ID NO: 25272 - DNA, 21 bp, Artificial Sequence
  ALK Reverse Primer
tctcccctctctatactcgca

SEQ ID NO: 25273 - DNA, 20 bp, Artificial Sequence
  ALK Reverse Primer
tgctgcctttttatttggct

SEQ ID NO: 25274 - DNA, 20 bp, Artificial Sequence
  ALK Reverse Primer
gccactgaattttaccccaa

SEQ ID NO: 25275 - DNA, 20 bp, Artificial Sequence
  ALK Reverse Primer
cgaacatctggatgaagcac

SEQ ID NO: 25276 - DNA, 20 bp, Artificial Sequence
  ALK Reverse Primer
gccacaaaattagctctggc

SEQ ID NO: 25277 - DNA, 21 bp, Artificial Sequence
  ALK Reverse Primer
ggaggaactgtagcattgacc

SEQ ID NO: 25278 - DNA, 20 bp, Artificial Sequence
  ALK Reverse Primer
aatgaggtcaattccatgcc

SEQ ID NO: 25279 - DNA, 20 bp, Artificial Sequence
  ALK Reverse Primer
ataagctgttgggttgtgcc

SEQ ID NO: 25280 - DNA, 20 bp, Artificial Sequence
  ALK Reverse Primer
agtcatccggcatctctagg

SEQ ID NO: 25281 - DNA, 20 bp, Artificial Sequence
  ALK Reverse Primer
agaacgcagaagaagggaca

SEQ ID NO: 25282 - DNA, 21 bp, Artificial Sequence
  ALK Reverse Primer
tgttaatgctgcctaccttgg

SEQ ID NO: 25283 - DNA, 21 bp, Artificial Sequence
  ALK Reverse Primer
acctatttgccagataccacg

SEQ ID NO: 25284 - DNA, 20 bp, Artificial Sequence
  ALK Reverse Primer
ctgagatgcaaagggaaagg

SEQ ID NO: 25285 - DNA, 20 bp, Artificial Sequence
  ALK Reverse Primer
tgggataatccaaattgcct

SEQ ID NO: 25286 - DNA, 20 bp, Artificial Sequence
  ALK Reverse Primer
agggtagtgggagtttggct

SEQ ID NO: 25287 - DNA, 21 bp, Artificial Sequence
  ALK Reverse Primer
aagcagttgctgcattaagga

SEQ ID NO: 25288 - DNA, 20 bp, Artificial Sequence
  ALK Reverse Primer
gtaactccccaggactcacg

SEQ ID NO: 25289 - DNA, 20 bp, Artificial Sequence
  ALK Reverse Primer
taccatggctggggtaagag

SEQ ID NO: 25290 - DNA, 20 bp, Artificial Sequence
  ALK Reverse Primer
gtccagagtcttcactgccc

SEQ ID NO: 25291 - DNA, 20 bp, Artificial Sequence
  ALK Reverse Primer
atcctgccacagaaacatcc

SEQ ID NO: 25292 - DNA, 20 bp, Artificial Sequence
  ALK Reverse Primer
cccttctagctggtgggtct

SEQ ID NO: 25293 - DNA, 20 bp, Artificial Sequence
  ALK Reverse Primer
cattccatggtcccagagat

SEQ ID NO: 25294 - DNA, 20 bp, Artificial Sequence
  ALK Reverse Primer
ttccttcacctccttttcca

SEQ ID NO: 25295 - DNA, 18 bp, Artificial Sequence
  ALK Reverse Primer
gatctgcacctgctcccc

SEQ ID NO: 25296 - DNA, 20 bp, Artificial Sequence
  ALK Reverse Primer
cagctatggacctaacccca

SEQ ID NO: 25297 - DNA, 20 bp, Artificial Sequence
  ALK Reverse Primer
gctgctagcaacatcaaaca

SEQ ID NO: 25298 - DNA, 20 bp, Artificial Sequence
  ALK Reverse Primer
gccagattatgagagcctgc

SEQ ID NO: 25299 - DNA, 19 bp, Artificial Sequence
  ALK Reverse Primer
gtttacatgcctgctgcgt

SEQ ID NO: 25300 - DNA, 20 bp, Artificial Sequence
  ALK Reverse Primer
ggcttcacatagatcctggc

SEQ ID NO: 25301 - DNA, 20 bp, Artificial Sequence
  ALK Reverse Primer
cttttgccaactgtgtggtg

SEQ ID NO: 25302 - DNA, 20 bp, Artificial Sequence
  ALK Reverse Primer
tccctgaaagcacaaactca

SEQ ID NO: 25303 - DNA, 20 bp, Artificial Sequence
  ALK Reverse Primer
catcctcctctccttcctcc

SEQ ID NO: 25304 - DNA, 20 bp, Artificial Sequence
  ALK Reverse Primer
aatttttgcctttcgcactg

SEQ ID NO: 25305 - DNA, 20 bp, Artificial Sequence
  ALK Reverse Primer
acactatgcgaaaagccctg

SEQ ID NO: 25306 - DNA, 20 bp, Artificial Sequence
  ALK Reverse Primer
cagccggtctcctaagtcag

SEQ ID NO: 25307 - DNA, 20 bp, Artificial Sequence
  ALK Reverse Primer
agcttttctgaggaggaggg

SEQ ID NO: 25308 - DNA, 20 bp, Artificial Sequence
  ALK Reverse Primer
cagctctgtgggtagtccct

SEQ ID NO: 25309 - DNA, 20 bp, Artificial Sequence
  ALK Reverse Primer
ctgtgaagggcaggaaatgt

SEQ ID NO: 25310 - DNA, 20 bp, Artificial Sequence
  ALK Reverse Primer
tgtcaatgggcattttggta

SEQ ID NO: 25311 - DNA, 20 bp, Artificial Sequence
  ALK Reverse Primer
acacacctatgttccccctg

SEQ ID NO: 25312 - DNA, 20 bp, Artificial Sequence
  ALK Reverse Primer
aatacactgggaggcacagc

SEQ ID NO: 25313 - DNA, 20 bp, Artificial Sequence
  ALK Reverse Primer
gagaggacaagacaaaggcg

SEQ ID NO: 25314 - DNA, 20 bp, Artificial Sequence
  ALK Reverse Primer
accatcccagaggaaggtct

SEQ ID NO: 25315 - DNA, 20 bp, Artificial Sequence
  ALK Reverse Primer
accctctcccagagctgttt

SEQ ID NO: 25316 - DNA, 20 bp, Artificial Sequence
  ALK Reverse Primer
ggggcttcgtttcttattcc

SEQ ID NO: 25317 - DNA, 20 bp, Artificial Sequence
  ALK Reverse Primer
ggctgcttatccaattccaa

SEQ ID NO: 25318 - DNA, 20 bp, Artificial Sequence
  ALK Reverse Primer
atgggtaagactggtgtggg

SEQ ID NO: 25319 - DNA, 20 bp, Artificial Sequence
  ALK Reverse Primer
caggaaggaagctggttgag

SEQ ID NO: 25320 - DNA, 20 bp, Artificial Sequence
  ALK Reverse Primer
tgagggaggcacagagactt

SEQ ID NO: 25321 - DNA, 20 bp, Artificial Sequence
  ALK Reverse Primer
tttcatctgcaaggcatcat

SEQ ID NO: 25322 - DNA, 24 bp, Artificial Sequence
  ALK Reverse Primer
ctttacagatgagagagctagggc

SEQ ID NO: 25323 - DNA, 20 bp, Artificial Sequence
  ALK Reverse Primer
gcacaacctcgagcaaatta

SEQ ID NO: 25324 - DNA, 20 bp, Artificial Sequence
  ALK Reverse Primer
aatcctagaggcgggagaaa

SEQ ID NO: 25325 - DNA, 20 bp, Artificial Sequence
  ALK Reverse Primer
tgtcacctgccaaatctgaa

SEQ ID NO: 25326 - DNA, 20 bp, Artificial Sequence
  ALK Reverse Primer
ttccaacatttttggccact

SEQ ID NO: 25327 - DNA, 20 bp, Artificial Sequence
  ALK Reverse Primer
tcagcttctccagcttcctc

SEQ ID NO: 25328 - DNA, 20 bp, Artificial Sequence
  ALK Reverse Primer
agagcggaggacagcttcag

SEQ ID NO: 25329 - DNA, 20 bp, Artificial Sequence
  ALK Reverse Primer
gttttcttcttccacctgcg

SEQ ID NO: 25330 - DNA, 20 bp, Artificial Sequence
  ALK Reverse Primer
tcaaccttcctccctttcct

SEQ ID NO: 25331 - DNA, 20 bp, Artificial Sequence
  ALK Reverse Primer
ggacctcaggacattaccca

SEQ ID NO: 25332 - DNA, 20 bp, Artificial Sequence
  ALK Reverse Primer
tgctctgccaagactcaaaa

SEQ ID NO: 25333 - DNA, 21 bp, Artificial Sequence
  ALK Reverse Primer
tcctttgtcttctctttcccc

SEQ ID NO: 25334 - DNA, 20 bp, Artificial Sequence
  ALK Reverse Primer
atggatatcagccctgcttg

SEQ ID NO: 25335 - DNA, 18 bp, Artificial Sequence
  ALK Reverse Primer
aggacacatgcccagagc

SEQ ID NO: 25336 - DNA, 20 bp, Artificial Sequence
  ALK Reverse Primer
acaaaagaagggctcagggt

SEQ ID NO: 25337 - DNA, 20 bp, Artificial Sequence
  ALK Reverse Primer
tcttcctccaacacaatccc

SEQ ID NO: 25338 - DNA, 20 bp, Artificial Sequence
  ALK Reverse Primer
aacatactgcccctatcccc

SEQ ID NO: 25339 - DNA, 20 bp, Artificial Sequence
  ALK Reverse Primer
tgcccttcctttcaattcag

SEQ ID NO: 25340 - DNA, 20 bp, Artificial Sequence
  ALK Reverse Primer
atcacagagatcagcctggg

SEQ ID NO: 25341 - DNA, 20 bp, Artificial Sequence
  ALK Reverse Primer
gattctggtgcacaccactg

SEQ ID NO: 25342 - DNA, 20 bp, Artificial Sequence
  ALK Reverse Primer
tctactgttgtgccgtggag

SEQ ID NO: 25343 - DNA, 20 bp, Artificial Sequence
  ALK Reverse Primer
tgcctcccagaaataccatt

SEQ ID NO: 25344 - DNA, 20 bp, Artificial Sequence
  ALK Reverse Primer
gtccccttctgaaagtggtg

SEQ ID NO: 25345 - DNA, 20 bp, Artificial Sequence
  ALK Reverse Primer
ccatccccaactgtgtctgt

SEQ ID NO: 25346 - DNA, 20 bp, Artificial Sequence
  ALK Reverse Primer
ccagctccaactctacagcc

SEQ ID NO: 25347 - DNA, 20 bp, Artificial Sequence
  ALK Reverse Primer
tgcctgtctttcccctgtag

SEQ ID NO: 25348 - DNA, 20 bp, Artificial Sequence
  ALK Reverse Primer
tgtgggatgggagacatttt

SEQ ID NO: 25349 - DNA, 20 bp, Artificial Sequence
  ALK Reverse Primer
agctatcagctgggacctca

SEQ ID NO: 25350 - DNA, 21 bp, Artificial Sequence
  ALK Reverse Primer
ttctttcctcacaagatgcct

SEQ ID NO: 25351 - DNA, 20 bp, Artificial Sequence
  ALK Reverse Primer
agcctttccctgcaagaagt

SEQ ID NO: 25352 - DNA, 23 bp, Artificial Sequence
  ALK Reverse Primer
ccatcaggttggatatttaccat

SEQ ID NO: 25353 - DNA, 20 bp, Artificial Sequence
  ALK Reverse Primer
atcctgcatgaccttgtggt

SEQ ID NO: 25354 - DNA, 20 bp, Artificial Sequence
  ALK Reverse Primer
aggcttaatgtcaccaggga

SEQ ID NO: 25355 - DNA, 20 bp, Artificial Sequence
  ALK Reverse Primer
gttgctcttagatgctgggc

SEQ ID NO: 25356 - DNA, 20 bp, Artificial Sequence
  ALK Reverse Primer
gcttggatctgtgggtcagt

SEQ ID NO: 25357 - DNA, 20 bp, Artificial Sequence
  ALK Reverse Primer
gtgaggaaattgaggcttgg

SEQ ID NO: 25358 - DNA, 20 bp, Artificial Sequence
  ALK Reverse Primer
gggagtgtggctggagatac

SEQ ID NO: 25359 - DNA, 20 bp, Artificial Sequence
  ALK Reverse Primer
ggtcccagcacacatctttt

SEQ ID NO: 25360 - DNA, 20 bp, Artificial Sequence
  ALK Reverse Primer
tctggattctgtctctgggc

SEQ ID NO: 25361 - DNA, 20 bp, Artificial Sequence
  ALK Reverse Primer
taaaagcgattttgatgccc

SEQ ID NO: 25362 - DNA, 19 bp, Artificial Sequence
  ALK Reverse Primer
ggtggggaccagagaagaa

SEQ ID NO: 25363 - DNA, 20 bp, Artificial Sequence
  ALK Reverse Primer
gaggtcctgtccaaggcata

SEQ ID NO: 25364 - DNA, 20 bp, Artificial Sequence
  ALK Reverse Primer
tcaggccagaagagctgagt

SEQ ID NO: 25365 - DNA, 20 bp, Artificial Sequence
  ALK Reverse Primer
gctcacatcagcctccaact

SEQ ID NO: 25366 - DNA, 20 bp, Artificial Sequence
  ALK Reverse Primer
atggtctaggcgctagggat

SEQ ID NO: 25367 - DNA, 20 bp, Artificial Sequence
  ALK Reverse Primer
ggaataggaggtttcctgcc

SEQ ID NO: 25368 - DNA, 20 bp, Artificial Sequence
  ALK Reverse Primer
tgattgatcctgcaatccaa

SEQ ID NO: 25369 - DNA, 20 bp, Artificial Sequence
  ALK Reverse Primer
tgactgcaggaatgttgtga

SEQ ID NO: 25370 - DNA, 20 bp, Artificial Sequence
  ALK Reverse Primer
tcctccaaggaagactggaa

SEQ ID NO: 25371 - DNA, 20 bp, Artificial Sequence
  ALK Reverse Primer
tgggttttctgcttcgactt

SEQ ID NO: 25372 - DNA, 20 bp, Artificial Sequence
  ALK Reverse Primer
ggggagggattctcattctc

SEQ ID NO: 25373 - DNA, 20 bp, Artificial Sequence
  ALK Reverse Primer
acagtgggatttgtttggga

SEQ ID NO: 25374 - DNA, 20 bp, Artificial Sequence
  ALK Reverse Primer
tttgaaataattcaggcggc

SEQ ID NO: 25375 - DNA, 20 bp, Artificial Sequence
  ALK Reverse Primer
caggatggagaggagactgc

SEQ ID NO: 25376 - DNA, 20 bp, Artificial Sequence
  ALK Reverse Primer
aaacccagatctcccctttc

SEQ ID NO: 25377 - DNA, 20 bp, Artificial Sequence
  ALK Reverse Primer
aggcaagagctcagaaatgc

SEQ ID NO: 25378 - DNA, 20 bp, Artificial Sequence
  ALK Reverse Primer
gataaaagcaccaacctgcc

SEQ ID NO: 25379 - DNA, 20 bp, Artificial Sequence
  ALK Reverse Primer
tgggaaaagtttcatggagg

SEQ ID NO: 25380 - DNA, 18 bp, Artificial Sequence
  ALK Reverse Primer
ccattctgcaggctcctt

SEQ ID NO: 25381 - DNA, 20 bp, Artificial Sequence
  ALK Reverse Primer
cgagatttgttttgagggga

SEQ ID NO: 25382 - DNA, 20 bp, Artificial Sequence
  ALK Reverse Primer
cgcccagcctggtattatct

SEQ ID NO: 25383 - DNA, 20 bp, Artificial Sequence
  ALK Reverse Primer
cagcacccatcctcagaaat

SEQ ID NO: 25384 - DNA, 20 bp, Artificial Sequence
  ALK Reverse Primer
gcacttgaccacagtcctga

SEQ ID NO: 25385 - DNA, 20 bp, Artificial Sequence
  ALK Reverse Primer
aatcattcagggaggcattg

SEQ ID NO: 25386 - DNA, 20 bp, Artificial Sequence
  ALK Reverse Primer
gaaaaggtcgtgcagctttc

SEQ ID NO: 25387 - DNA, 20 bp, Artificial Sequence
  ALK Reverse Primer
actggcatcacttgggaatc

SEQ ID NO: 25388 - DNA, 20 bp, Artificial Sequence
  ALK Reverse Primer
ctctgccaaaggttttcctg

SEQ ID NO: 25389 - DNA, 20 bp, Artificial Sequence
  ALK Reverse Primer
ctccacagctaggaacagcc

SEQ ID NO: 25390 - DNA, 20 bp, Artificial Sequence
  ALK Reverse Primer
agagggactcctttttggga

SEQ ID NO: 25391 - DNA, 20 bp, Artificial Sequence
  ALK Reverse Primer
gggattccccttaggacttc

SEQ ID NO: 25392 - DNA, 20 bp, Artificial Sequence
  ALK Reverse Primer
tttccactgcagagaaacca

SEQ ID NO: 25393 - DNA, 20 bp, Artificial Sequence
  ALK Reverse Primer
cctggttaaagacccagcag

SEQ ID NO: 25394 - DNA, 20 bp, Artificial Sequence
  ALK Reverse Primer
aaaggcattggtggattcag

SEQ ID NO: 25395 - DNA, 20 bp, Artificial Sequence
  ALK Reverse Primer
gggggacacagctgattaag

SEQ ID NO: 25396 - DNA, 20 bp, Artificial Sequence
  ALK Reverse Primer
atacagccaggaacagcagg

SEQ ID NO: 25397 - DNA, 20 bp, Artificial Sequence
  ALK Reverse Primer
gaagatgagcctttaccccc

SEQ ID NO: 25398 - DNA, 20 bp, Artificial Sequence
  ALK Reverse Primer
aaggccatttgcagttccta

SEQ ID NO: 25399 - DNA, 20 bp, Artificial Sequence
  ALK Reverse Primer
ccttccttatcagccccttc

SEQ ID NO: 25400 - DNA, 20 bp, Artificial Sequence
  ALK Reverse Primer
ctcaaagggcatggttagga

SEQ ID NO: 25401 - DNA, 20 bp, Artificial Sequence
  ALK Reverse Primer
gcatcttcccatcctgtgat

SEQ ID NO: 25402 - DNA, 21 bp, Artificial Sequence
  ALK Reverse Primer
aggtctgccacttacgaatca

SEQ ID NO: 25403 - DNA, 20 bp, Artificial Sequence
  ALK Reverse Primer
caaccttggaaaggctcaaa

SEQ ID NO: 25404 - DNA, 20 bp, Artificial Sequence
  ALK Reverse Primer
aaaaggagcagggtcactca

SEQ ID NO: 25405 - DNA, 20 bp, Artificial Sequence
  ALK Reverse Primer
agaatcctggaacattcccc

SEQ ID NO: 25406 - DNA, 20 bp, Artificial Sequence
  ALK Reverse Primer
gaacccagctctgtcagctc

SEQ ID NO: 25407 - DNA, 20 bp, Artificial Sequence
  ALK Reverse Primer
gcagatgaggacagccaagt

SEQ ID NO: 25408 - DNA, 20 bp, Artificial Sequence
  ALK Reverse Primer
gttttgctggtccccactaa

SEQ ID NO: 25409 - DNA, 23 bp, Artificial Sequence
  ALK Reverse Primer
tcccaagtaacaactttcagagc

SEQ ID NO: 25410 - DNA, 20 bp, Artificial Sequence
  ALK Reverse Primer
gcttccagcctcaattcttg

SEQ ID NO: 25411 - DNA, 21 bp, Artificial Sequence
  ALK Reverse Primer
tcctgaactaagccactggaa

SEQ ID NO: 25412 - DNA, 20 bp, Artificial Sequence
  ALK Reverse Primer
acacaggttgtggggaatgt

SEQ ID NO: 25413 - DNA, 20 bp, Artificial Sequence
  ALK Reverse Primer
tcaagacattccctcttggg

SEQ ID NO: 25414 - DNA, 20 bp, Artificial Sequence
  ALK Reverse Primer
ggaaggctgaagggaatagg

SEQ ID NO: 25415 - DNA, 20 bp, Artificial Sequence
  ALK Reverse Primer
ccatggaactgtgtcacctg

SEQ ID NO: 25416 - DNA, 23 bp, Artificial Sequence
  ALK Reverse Primer
tcaccaatcacttctctccagat

SEQ ID NO: 25417 - DNA, 20 bp, Artificial Sequence
  ALK Reverse Primer
gcttgatgtggcggttactt

SEQ ID NO: 25418 - DNA, 20 bp, Artificial Sequence
  ALK Reverse Primer
aggctctgtgagcaagaagg

SEQ ID NO: 25419 - DNA, 20 bp, Artificial Sequence
  ALK Reverse Primer
tctcaggtcaggtcagcctt

SEQ ID NO: 25420 - DNA, 20 bp, Artificial Sequence
  ALK Reverse Primer
tgcctggtctaaaacccttg

SEQ ID NO: 25421 - DNA, 20 bp, Artificial Sequence
  ALK Reverse Primer
gcccatgtttgctggttact

SEQ ID NO: 25422 - DNA, 20 bp, Artificial Sequence
  ALK Reverse Primer
tcacttcccttgtccctcac

SEQ ID NO: 25423 - DNA, 23 bp, Artificial Sequence
  ALK Reverse Primer
cctgccagagagaatatcagaca

SEQ ID NO: 25424 - DNA, 20 bp, Artificial Sequence
  ALK Reverse Primer
tggccaataatgcaatcaga

SEQ ID NO: 25425 - DNA, 22 bp, Artificial Sequence
  ALK Reverse Primer
tcagaagactgtcagtgaaggg

SEQ ID NO: 25426 - DNA, 20 bp, Artificial Sequence
  ALK Reverse Primer
tgggagtcatcagcacagag

SEQ ID NO: 25427 - DNA, 20 bp, Artificial Sequence
  ALK Reverse Primer
tgaaactggcaatggtgtgt

SEQ ID NO: 25428 - DNA, 20 bp, Artificial Sequence
  ALK Reverse Primer
gaagcttgatgggttttgga

SEQ ID NO: 25429 - DNA, 20 bp, Artificial Sequence
  ALK Reverse Primer
tgcgttcaggactttgtacg

SEQ ID NO: 25430 - DNA, 21 bp, Artificial Sequence
  ALK Reverse Primer
accagagctgctttgttatgg

SEQ ID NO: 25431 - DNA, 20 bp, Artificial Sequence
  ALK Reverse Primer
agcatgactgggaaggtgtt

SEQ ID NO: 25432 - DNA, 20 bp, Artificial Sequence
  ALK Reverse Primer
ttgaaccagcgaatcttttg

SEQ ID NO: 25433 - DNA, 20 bp, Artificial Sequence
  ALK Reverse Primer
aaaggggtttcccctcatta

SEQ ID NO: 25434 - DNA, 21 bp, Artificial Sequence
  ALK Reverse Primer
tgtaatcccccagacagagtg

SEQ ID NO: 25435 - DNA, 20 bp, Artificial Sequence
  ALK Reverse Primer
aagggatccatcacaagcag

SEQ ID NO: 25436 - DNA, 22 bp, Artificial Sequence
  ALK Reverse Primer
aatttggaagaatctgattgga

SEQ ID NO: 25437 - DNA, 20 bp, Artificial Sequence
  ALK Reverse Primer
aggccatgcagagatgaaag

SEQ ID NO: 25438 - DNA, 20 bp, Artificial Sequence
  ALK Reverse Primer
aacgtctctagcccccttgt

SEQ ID NO: 25439 - DNA, 20 bp, Artificial Sequence
  ALK Reverse Primer
caacatgagggtccttcaaa

SEQ ID NO: 25440 - DNA, 20 bp, Artificial Sequence
  ALK Reverse Primer
tgttggacaagtctgttggg

SEQ ID NO: 25441 - DNA, 21 bp, Artificial Sequence
  ALK Reverse Primer
tgttgaaaatcaggagggaaa

SEQ ID NO: 25442 - DNA, 20 bp, Artificial Sequence
  ALK Reverse Primer
aggcagatggagtggagaga

SEQ ID NO: 25443 - DNA, 20 bp, Artificial Sequence
  ALK Reverse Primer
ggaagaggtcaaggctgaag

SEQ ID NO: 25444 - DNA, 20 bp, Artificial Sequence
  ALK Reverse Primer
agccccgtgaagctattaca

SEQ ID NO: 25445 - DNA, 20 bp, Artificial Sequence
  ALK Reverse Primer
gaaccagccagagcagagag

SEQ ID NO: 25446 - DNA, 22 bp, Artificial Sequence
  ALK Reverse Primer
tgatggtttccttttgagactg

SEQ ID NO: 25447 - DNA, 20 bp, Artificial Sequence
  ALK Reverse Primer
ttggagaggtcaattcctgc

SEQ ID NO: 25448 - DNA, 20 bp, Artificial Sequence
  ALK Reverse Primer
tggtaggaaggatcatgcag

SEQ ID NO: 25449 - DNA, 20 bp, Artificial Sequence
  ALK Reverse Primer
ccattgctgaatgtgtggac

SEQ ID NO: 25450 - DNA, 21 bp, Artificial Sequence
  ALK Reverse Primer
tttgctttgtgtttttcctcc

SEQ ID NO: 25451 - DNA, 20 bp, Artificial Sequence
  ALK Reverse Primer
ggctgcacttggagtttctc

SEQ ID NO: 25452 - DNA, 20 bp, Artificial Sequence
  ALK Reverse Primer
accctttggactgaagggac

SEQ ID NO: 25453 - DNA, 20 bp, Artificial Sequence
  ALK Reverse Primer
tgagttgggtgtggtttgaa

SEQ ID NO: 25454 - DNA, 21 bp, Artificial Sequence
  ALK Reverse Primer
cacccaatcccttggttattt

SEQ ID NO: 25455 - DNA, 20 bp, Artificial Sequence
  ALK Reverse Primer
ggtggtgaggtagtggagga

SEQ ID NO: 25456 - DNA, 20 bp, Artificial Sequence
  ALK Reverse Primer
ccctggagacgtataaccca

SEQ ID NO: 25457 - DNA, 21 bp, Artificial Sequence
  ALK Reverse Primer
cagttcaaagagtccaccagc

SEQ ID NO: 25458 - DNA, 20 bp, Artificial Sequence
  ALK Reverse Primer
tggtgccatctggagttgta

SEQ ID NO: 25459 - DNA, 24 bp, Artificial Sequence
  ALK Reverse Primer
ttcttaaatgttcctaaatgggga

SEQ ID NO: 25460 - DNA, 20 bp, Artificial Sequence
  ALK Reverse Primer
aaccacagttcccctttcct

SEQ ID NO: 25461 - DNA, 20 bp, Artificial Sequence
  ALK Reverse Primer
tcagcagaagtctcagtgcc

SEQ ID NO: 25462 - DNA, 20 bp, Artificial Sequence
  ALK Reverse Primer
atcactgagcagggcaaaag

SEQ ID NO: 25463 - DNA, 20 bp, Artificial Sequence
  ALK Reverse Primer
tggcagaaggaatcagaacc

SEQ ID NO: 25464 - DNA, 20 bp, Artificial Sequence
  ALK Reverse Primer
ggtgaattgggagaattgga

SEQ ID NO: 25465 - DNA, 20 bp, Artificial Sequence
  ALK Reverse Primer
ttccctgtaagcactccctc

SEQ ID NO: 25466 - DNA, 20 bp, Artificial Sequence
  ALK Reverse Primer
tcccaaattcacccattcat

SEQ ID NO: 25467 - DNA, 20 bp, Artificial Sequence
  ALK Reverse Primer
ctgcccaagtgtcttgtctg

SEQ ID NO: 25468 - DNA, 20 bp, Artificial Sequence
  ALK Reverse Primer
ttggaacagcctggtctctc

SEQ ID NO: 25469 - DNA, 20 bp, Artificial Sequence
  ALK Reverse Primer
cctcagtggcccagtacatt

SEQ ID NO: 25470 - DNA, 20 bp, Artificial Sequence
  ALK Reverse Primer
aggcaaaagggctcatttct

SEQ ID NO: 25471 - DNA, 20 bp, Artificial Sequence
  ALK Reverse Primer
ctgttgttccacccaagatg

SEQ ID NO: 25472 - DNA, 20 bp, Artificial Sequence
  ALK Reverse Primer
aaaagggcccattgtagagc

SEQ ID NO: 25473 - DNA, 20 bp, Artificial Sequence
  ALK Reverse Primer
actgagttgggggtgtgtgt

SEQ ID NO: 25474 - DNA, 20 bp, Artificial Sequence
  ALK Reverse Primer
caggtattgccagggattgt

SEQ ID NO: 25475 - DNA, 20 bp, Artificial Sequence
  ALK Reverse Primer
ttcacttccaccccactttc

SEQ ID NO: 25476 - DNA, 20 bp, Artificial Sequence
  ALK Reverse Primer
ggctgctccagttcaatctc

SEQ ID NO: 25477 - DNA, 19 bp, Artificial Sequence
  ALK Reverse Primer
atcctcctcggagctgaag

SEQ ID NO: 25478 - DNA, 20 bp, Artificial Sequence
  ALK Reverse Primer
agcagtgtaaacggcctcct

SEQ ID NO: 25479 - DNA, 20 bp, Artificial Sequence
  ALK Reverse Primer
aggagaggacggtacccaac

SEQ ID NO: 25480 - DNA, 20 bp, Artificial Sequence
  ALK Reverse Primer
gttcagcaggcagacagtcc

SEQ ID NO: 25481 - DNA, 18 bp, Artificial Sequence
  ALK Reverse Primer
gcctctgttcggagggtc

SEQ ID NO: 25482 - DNA, 21 bp, Artificial Sequence
  ALK Reverse Primer
ttagggagagtgcttgattgc

SEQ ID NO: 25483 - DNA, 20 bp, Artificial Sequence
  EML4 Forward Primer
cttactaccccagggcgaac

SEQ ID NO: 25484 - DNA, 20 bp, Artificial Sequence
  EML4 Forward Primer
tgtgtcagaccctcctttcc

SEQ ID NO: 25485 - DNA, 20 bp, Artificial Sequence
  EML4 Forward Primer
gaagcatcggagcatcattt

SEQ ID NO: 25486 - DNA, 20 bp, Artificial Sequence
  EML4 Forward Primer
gctgaagtgccttttcagtg

SEQ ID NO: 25487 - DNA, 23 bp, Artificial Sequence
  EML4 Forward Primer
cgcctttcttttacatttcttga

SEQ ID NO: 25488 - DNA, 20 bp, Artificial Sequence
  EML4 Forward Primer
ggaggcaactgagtgttgtg

SEQ ID NO: 25489 - DNA, 21 bp, Artificial Sequence
  EML4 Forward Primer
tcatcctgtaggagtggtgag

SEQ ID NO: 25490 - DNA, 20 bp, Artificial Sequence
  EML4 Forward Primer
aagatgaattgcagttgggg

SEQ ID NO: 25491 - DNA, 20 bp, Artificial Sequence
  EML4 Forward Primer
tcccccttgcaagagtaaaa

SEQ ID NO: 25492 - DNA, 20 bp, Artificial Sequence
  EML4 Forward Primer
cgtgaagttcttctggggtt

SEQ ID NO: 25493 - DNA, 20 bp, Artificial Sequence
  EML4 Forward Primer
cccttgattgttgcatgttt

SEQ ID NO: 25494 - DNA, 22 bp, Artificial Sequence
  EML4 Forward Primer
ggcagcactttagaaacctttt

SEQ ID NO: 25495 - DNA, 22 bp, Artificial Sequence
  EML4 Forward Primer
ttcttccccctaagaaaaatca

SEQ ID NO: 25496 - DNA, 21 bp, Artificial Sequence
  EML4 Forward Primer
ccatttgtatgcagctgatgt

SEQ ID NO: 25497 - DNA, 21 bp, Artificial Sequence
  EML4 Forward Primer
tcctgaatcagcttcttttcc

SEQ ID NO: 25498 - DNA, 20 bp, Artificial Sequence
  EML4 Forward Primer
gccatgctttgattgtgcta

SEQ ID NO: 25499 - DNA, 21 bp, Artificial Sequence
  EML4 Forward Primer
tcgtgtgatattgcttcatgg

SEQ ID NO: 25500 - DNA, 20 bp, Artificial Sequence
  EML4 Forward Primer
gccaaaaacaacaactgcaa

SEQ ID NO: 25501 - DNA, 20 bp, Artificial Sequence
  EML4 Forward Primer
aagcaggttgtctgcatggt

SEQ ID NO: 25502 - DNA, 20 bp, Artificial Sequence
  EML4 Forward Primer
tccagatggggaacatccta

SEQ ID NO: 25503 - DNA, 21 bp, Artificial Sequence
  EML4 Forward Primer
tgtgtaaataaagccaacggg

SEQ ID NO: 25504 - DNA, 20 bp, Artificial Sequence
  EML4 Forward Primer
ggctccaagaatatgttccg

SEQ ID NO: 25505 - DNA, 20 bp, Artificial Sequence
  EML4 Forward Primer
gcattccattccagatggtc

SEQ ID NO: 25506 - DNA, 20 bp, Artificial Sequence
  EML4 Forward Primer
ggtgatacaacctgtgtggg

SEQ ID NO: 25507 - DNA, 21 bp, Artificial Sequence
  EML4 Forward Primer
ttcaggacctacatccagtca

SEQ ID NO: 25508 - DNA, 20 bp, Artificial Sequence
  EML4 Forward Primer
cacctggctctcacctacct

SEQ ID NO: 25509 - DNA, 23 bp, Artificial Sequence
  EML4 Forward Primer
gcacatttgattttccttacaga

SEQ ID NO: 25510 - DNA, 22 bp, Artificial Sequence
  EML4 Forward Primer
ttttctctcctttgtgcaatga

SEQ ID NO: 25511 - DNA, 20 bp, Artificial Sequence
  EML4 Forward Primer
cagccttgggttaaggttga

SEQ ID NO: 25512 - DNA, 20 bp, Artificial Sequence
  EML4 Forward Primer
ccaaaataaggagatgccga

SEQ ID NO: 25513 - DNA, 23 bp, Artificial Sequence
  EML4 Forward Primer
gagcaagcttttgagaatcattt

SEQ ID NO: 25514 - DNA, 20 bp, Artificial Sequence
  EML4 Forward Primer
gcctttcaaaatacggtgct

SEQ ID NO: 25515 - DNA, 22 bp, Artificial Sequence
  EML4 Forward Primer
ggtgatggtgttttacaaccag

SEQ ID NO: 25516 - DNA, 20 bp, Artificial Sequence
  EML4 Forward Primer
agtctcttccctcccattcc

SEQ ID NO: 25517 - DNA, 22 bp, Artificial Sequence
  EML4 Forward Primer
cagtgaatgatgggaaatcaga

SEQ ID NO: 25518 - DNA, 20 bp, Artificial Sequence
  EML4 Forward Primer
ggccagatttggctgtgtag

SEQ ID NO: 25519 - DNA, 20 bp, Artificial Sequence
  EML4 Forward Primer
accatgggaagtgtgtgtca

SEQ ID NO: 25520 - DNA, 20 bp, Artificial Sequence
  EML4 Forward Primer
gcaggactttggtcctgtta

SEQ ID NO: 25521 - DNA, 21 bp, Artificial Sequence
  EML4 Forward Primer
gagcatcatttgtaaacccca

SEQ ID NO: 25522 - DNA, 20 bp, Artificial Sequence
  EML4 Forward Primer
gaaacactgtgcctgacctg

SEQ ID NO: 25523 - DNA, 20 bp, Artificial Sequence
  EML4 Forward Primer
ctgcttggccaggatcttta

SEQ ID NO: 25524 - DNA, 23 bp, Artificial Sequence
  EML4 Forward Primer
ttgcatggttagctagttcattg

SEQ ID NO: 25525 - DNA, 25 bp, Artificial Sequence
  EML4 Forward Primer
tgtatcatactcagtttttatgcca

SEQ ID NO: 25526 - DNA, 20 bp, Artificial Sequence
  EML4 Forward Primer
gatttgtgccagcttttggt

SEQ ID NO: 25527 - DNA, 20 bp, Artificial Sequence
  EML4 Forward Primer
ctttggaagcttgtgcaaat

SEQ ID NO: 25528 - DNA, 20 bp, Artificial Sequence
  EML4 Forward Primer
tgccaatcatttagcccttc

SEQ ID NO: 25529 - DNA, 20 bp, Artificial Sequence
  EML4 Forward Primer
gctggcgagaagattagagg

SEQ ID NO: 25530 - DNA, 20 bp, Artificial Sequence
  EML4 Forward Primer
acagtaaccaccctgcctcc

SEQ ID NO: 25531 - DNA, 21 bp, Artificial Sequence
  EML4 Forward Primer
tggtaaagaaaaagaaccccc

SEQ ID NO: 25532 - DNA, 20 bp, Artificial Sequence
  EML4 Forward Primer
cagatgtgctccacctcaaa

SEQ ID NO: 25533 - DNA, 23 bp, Artificial Sequence
  EML4 Forward Primer
cagagaccagtttgctacaggtt

SEQ ID NO: 25534 - DNA, 20 bp, Artificial Sequence
  EML4 Forward Primer
ggtggaattgaaagctggaa

SEQ ID NO: 25535 - DNA, 20 bp, Artificial Sequence
  EML4 Forward Primer
aggggccaaaagttgaaagt

SEQ ID NO: 25536 - DNA, 20 bp, Artificial Sequence
  EML4 Forward Primer
ggaggagagcagctaggatg

SEQ ID NO: 25537 - DNA, 20 bp, Artificial Sequence
  EML4 Forward Primer
agctggaatggaagtggtgt

SEQ ID NO: 25538 - DNA, 20 bp, Artificial Sequence
  EML4 Forward Primer
aaattatggcctttgctcca

SEQ ID NO: 25539 - DNA, 21 bp, Artificial Sequence
  EML4 Forward Primer
tcctcaagttcagcagtttga

SEQ ID NO: 25540 - DNA, 20 bp, Artificial Sequence
  EML4 Forward Primer
gctgcctgctgtattctcct

SEQ ID NO: 25541 - DNA, 20 bp, Artificial Sequence
  EML4 Forward Primer
tccatctgtggtagcccttt

SEQ ID NO: 25542 - DNA, 21 bp, Artificial Sequence
  EML4 Forward Primer
tgccacatgtataggcacaaa

SEQ ID NO: 25543 - DNA, 22 bp, Artificial Sequence
  EML4 Forward Primer
tgaatggcttgctgtatttgtt

SEQ ID NO: 25544 - DNA, 21 bp, Artificial Sequence
  EML4 Forward Primer
ccaaagaactttgattcgagg

SEQ ID NO: 25545 - DNA, 21 bp, Artificial Sequence
  EML4 Forward Primer
aaactaatttcagcttgccca

SEQ ID NO: 25546 - DNA, 20 bp, Artificial Sequence
  EML4 Forward Primer
agaattccctaatttggccc

SEQ ID NO: 25547 - DNA, 22 bp, Artificial Sequence
  EML4 Forward Primer
gtcctggattcaaattctgacc

SEQ ID NO: 25548 - DNA, 20 bp, Artificial Sequence
  EML4 Forward Primer
ttagggttgtttgcctctgc

SEQ ID NO: 25549 - DNA, 20 bp, Artificial Sequence
  EML4 Forward Primer
caacttatgagggccagagg

SEQ ID NO: 25550 - DNA, 20 bp, Artificial Sequence
  EML4 Forward Primer
tcggacatcagtatgcgaga

SEQ ID NO: 25551 - DNA, 20 bp, Artificial Sequence
  EML4 Forward Primer
tgagacagggtctcgttctg

SEQ ID NO: 25552 - DNA, 20 bp, Artificial Sequence
  EML4 Forward Primer
tttggaaactcaaggcccta

SEQ ID NO: 25553 - DNA, 24 bp, Artificial Sequence
  EML4 Forward Primer
tcaaagtaatcagaaggtccatgt

SEQ ID NO: 25554 - DNA, 20 bp, Artificial Sequence
  EML4 Forward Primer
tggtaggggtgtgaggctta

SEQ ID NO: 25555 - DNA, 21 bp, Artificial Sequence
  EML4 Forward Primer
cctgtggattagtcccctctg

SEQ ID NO: 25556 - DNA, 26 bp, Artificial Sequence
  EML4 Forward Primer
tgttgatggtttttaatttcctaatg

SEQ ID NO: 25557 - DNA, 20 bp, Artificial Sequence
  EML4 Forward Primer
cccttcctcagctagtccct

SEQ ID NO: 25558 - DNA, 20 bp, Artificial Sequence
  EML4 Forward Primer
gctgtgccctgtgttctgta

SEQ ID NO: 25559 - DNA, 27 bp, Artificial Sequence
  EML4 Forward Primer
ccttaacgtacagaaaaagtacactca

SEQ ID NO: 25560 - DNA, 20 bp, Artificial Sequence
  EML4 Forward Primer
acccagtctcctgttggact

SEQ ID NO: 25561 - DNA, 27 bp, Artificial Sequence
  EML4 Forward Primer
aaaattaaggatattgatgacttgttt

SEQ ID NO: 25562 - DNA, 19 bp, Artificial Sequence
  EML4 Forward Primer
gcgggagtcacagatcact

SEQ ID NO: 25563 - DNA, 24 bp, Artificial Sequence
  EML4 Forward Primer
tcctagagtttacagcggattttt

SEQ ID NO: 25564 - DNA, 20 bp, Artificial Sequence
  EML4 Forward Primer
ccaaacaatgagtgcttgct

SEQ ID NO: 25565 - DNA, 20 bp, Artificial Sequence
  EML4 Forward Primer
tgcaaaagcaacagacaagg

SEQ ID NO: 25566 - DNA, 23 bp, Artificial Sequence
  EML4 Forward Primer
gggatacagtcctcctgtactga

SEQ ID NO: 25567 - DNA, 21 bp, Artificial Sequence
  EML4 Forward Primer
cattgcttgattgctgaactg

SEQ ID NO: 25568 - DNA, 20 bp, Artificial Sequence
  EML4 Forward Primer
ttccctctctccctgctaca

SEQ ID NO: 25569 - DNA, 24 bp, Artificial Sequence
  EML4 Forward Primer
aagacatgctttgaagtagctgaa

SEQ ID NO: 25570 - DNA, 21 bp, Artificial Sequence
  EML4 Forward Primer
aaacatccccatgaaaacaca

SEQ ID NO: 25571 - DNA, 20 bp, Artificial Sequence
  EML4 Forward Primer
gcctacttctggattgctgg

SEQ ID NO: 25572 - DNA, 20 bp, Artificial Sequence
  EML4 Forward Primer
ttccctccctgcagatagaa

SEQ ID NO: 25573 - DNA, 27 bp, Artificial Sequence
  EML4 Forward Primer
cctttatggtaaaataatgtattggat

SEQ ID NO: 25574 - DNA, 23 bp, Artificial Sequence
  EML4 Forward Primer
ggaatgaagttgatgagttttgc

SEQ ID NO: 25575 - DNA, 22 bp, Artificial Sequence
  EML4 Forward Primer
gctcttaaaatggcactgcttt

SEQ ID NO: 25576 - DNA, 27 bp, Artificial Sequence
  EML4 Forward Primer
agaaggtcacttaatgttaaaaatgat

SEQ ID NO: 25577 - DNA, 22 bp, Artificial Sequence
  EML4 Forward Primer
tgatctaggtgtgggtttagca

SEQ ID NO: 25578 - DNA, 20 bp, Artificial Sequence
  EML4 Forward Primer
acccattcaccacgagagag

SEQ ID NO: 25579 - DNA, 20 bp, Artificial Sequence
  EML4 Forward Primer
ctgacctcttggttgggcta

SEQ ID NO: 25580 - DNA, 20 bp, Artificial Sequence
  EML4 Forward Primer
cttcttccagattccccctc

SEQ ID NO: 25581 - DNA, 20 bp, Artificial Sequence
  EML4 Forward Primer
tctgttggttccttccctca

SEQ ID NO: 25582 - DNA, 20 bp, Artificial Sequence
  EML4 Forward Primer
ttggccctattcctttctca

SEQ ID NO: 25583 - DNA, 21 bp, Artificial Sequence
  EML4 Forward Primer
tctcacaagctttttccctga

SEQ ID NO: 25584 - DNA, 25 bp, Artificial Sequence
  EML4 Forward Primer
tgttacaattcatgtggatttcatt

SEQ ID NO: 25585 - DNA, 20 bp, Artificial Sequence
  EML4 Forward Primer
gcctagggtttagccactcc

SEQ ID NO: 25586 - DNA, 20 bp, Artificial Sequence
  EML4 Forward Primer
tcctacgcagacagaactgg

SEQ ID NO: 25587 - DNA, 25 bp, Artificial Sequence
  EML4 Forward Primer
tgtgataaacatttgcctacacact

SEQ ID NO: 25588 - DNA, 21 bp, Artificial Sequence
  EML4 Forward Primer
tctcatggtcttcactcaacg

SEQ ID NO: 25589 - DNA, 20 bp, Artificial Sequence
  EML4 Forward Primer
tttatgccacaaaaccccag

SEQ ID NO: 25590 - DNA, 22 bp, Artificial Sequence
  EML4 Forward Primer
tgtgtgagtgtctcactgtcct

SEQ ID NO: 25591 - DNA, 20 bp, Artificial Sequence
  EML4 Forward Primer
tagggcatcatttcaccaca

SEQ ID NO: 25592 - DNA, 20 bp, Artificial Sequence
  EML4 Forward Primer
agagactgactcatgccggt

SEQ ID NO: 25593 - DNA, 20 bp, Artificial Sequence
  EML4 Forward Primer
tgagaatgggggcatcttag

SEQ ID NO: 25594 - DNA, 23 bp, Artificial Sequence
  EML4 Forward Primer
aacactggaacactgtaactgga

SEQ ID NO: 25595 - DNA, 23 bp, Artificial Sequence
  EML4 Forward Primer
tgtgttttggtgtgtgtctatca

SEQ ID NO: 25596 - DNA, 27 bp, Artificial Sequence
  EML4 Forward Primer
aagcaaacagatagatgtatttagtca

SEQ ID NO: 25597 - DNA, 20 bp, Artificial Sequence
  EML4 Forward Primer
agagtgaaagagggggcatt

SEQ ID NO: 25598 - DNA, 20 bp, Artificial Sequence
  EML4 Forward Primer
cgtggctttgtgaaaggatg

SEQ ID NO: 25599 - DNA, 22 bp, Artificial Sequence
  EML4 Forward Primer
gccctttgaaaaattgttcttg

SEQ ID NO: 25600 - DNA, 20 bp, Artificial Sequence
  EML4 Forward Primer
tactgacttaatcgcggcct

SEQ ID NO: 25601 - DNA, 20 bp, Artificial Sequence
  EML4 Forward Primer
cgcagagggtaaagtgaagc

SEQ ID NO: 25602 - DNA, 20 bp, Artificial Sequence
  EML4 Forward Primer
ggcacaccctccttaaaaca

SEQ ID NO: 25603 - DNA, 22 bp, Artificial Sequence
  EML4 Forward Primer
tttttaaatgttgtggtggtgg

SEQ ID NO: 25604 - DNA, 22 bp, Artificial Sequence
  EML4 Forward Primer
tgcaagtcctttgtaattgctg

SEQ ID NO: 25605 - DNA, 20 bp, Artificial Sequence
  EML4 Forward Primer
tgcttcctcatcattgttgg

SEQ ID NO: 25606 - DNA, 20 bp, Artificial Sequence
  EML4 Forward Primer
agtacaggcacgagccactt

SEQ ID NO: 25607 - DNA, 20 bp, Artificial Sequence
  EML4 Forward Primer
tgatgttttgaggcgtcttg

SEQ ID NO: 25608 - DNA, 20 bp, Artificial Sequence
  EML4 Forward Primer
cagggcaggaactgaatcat

SEQ ID NO: 25609 - DNA, 20 bp, Artificial Sequence
  EML4 Forward Primer
tgctctgagtttggagcaga

SEQ ID NO: 25610 - DNA, 20 bp, Artificial Sequence
  EML4 Forward Primer
tagtgcagtcagccaaccag

SEQ ID NO: 25611 - DNA, 20 bp, Artificial Sequence
  EML4 Forward Primer
ccattggattcggcatttac

SEQ ID NO: 25612 - DNA, 20 bp, Artificial Sequence
  EML4 Forward Primer
ttgatgaggcaagtgtcctg

SEQ ID NO: 25613 - DNA, 20 bp, Artificial Sequence
  EML4 Forward Primer
ggcgggatacttattgtgga

SEQ ID NO: 25614 - DNA, 27 bp, Artificial Sequence
  EML4 Forward Primer
aaggtatttcagtaaagaaaattctga

SEQ ID NO: 25615 - DNA, 20 bp, Artificial Sequence
  EML4 Forward Primer
ttctggagccacagaaccat

SEQ ID NO: 25616 - DNA, 20 bp, Artificial Sequence
  EML4 Forward Primer
ttggcaactctgaacagctt

SEQ ID NO: 25617 - DNA, 23 bp, Artificial Sequence
  EML4 Forward Primer
ttttagcccctgtgaaattagaa

SEQ ID NO: 25618 - DNA, 20 bp, Artificial Sequence
  EML4 Forward Primer
atggtggtgatatgggaagg

SEQ ID NO: 25619 - DNA, 20 bp, Artificial Sequence
  EML4 Forward Primer
ttttgacggcatgtgttcat

SEQ ID NO: 25620 - DNA, 20 bp, Artificial Sequence
  EML4 Forward Primer
gaacccaaaggcaaaattga

SEQ ID NO: 25621 - DNA, 22 bp, Artificial Sequence
  EML4 Forward Primer
gcttctttgtcacttccactca

SEQ ID NO: 25622 - DNA, 20 bp, Artificial Sequence
  EML4 Forward Primer
catgaggcatgtgatggaga

SEQ ID NO: 25623 - DNA, 20 bp, Artificial Sequence
  EML4 Forward Primer
tcccaaggctagctgagaaa

SEQ ID NO: 25624 - DNA, 23 bp, Artificial Sequence
  EML4 Forward Primer
tttgtatttaggaactgtcaggc

SEQ ID NO: 25625 - DNA, 20 bp, Artificial Sequence
  EML4 Forward Primer
ccactgccctgaaatcagtt

SEQ ID NO: 25626 - DNA, 20 bp, Artificial Sequence
  EML4 Forward Primer
cattgtcttatcaccgccct

SEQ ID NO: 25627 - DNA, 20 bp, Artificial Sequence
  EML4 Forward Primer
ttgattggtgcatggatgat

SEQ ID NO: 25628 - DNA, 20 bp, Artificial Sequence
  EML4 Forward Primer
caggtctcctgcttcctgtc

SEQ ID NO: 25629 - DNA, 27 bp, Artificial Sequence
  EML4 Forward Primer
cccaaatctttacttgactcttagtat

SEQ ID NO: 25630 - DNA, 20 bp, Artificial Sequence
  EML4 Forward Primer
tggcatgggatttatggatt

SEQ ID NO: 25631 - DNA, 20 bp, Artificial Sequence
  EML4 Forward Primer
ttttctaccaccccctcctt

SEQ ID NO: 25632 - DNA, 20 bp, Artificial Sequence
  EML4 Forward Primer
cccatttatgaaagggggaa

SEQ ID NO: 25633 - DNA, 20 bp, Artificial Sequence
  EML4 Forward Primer
gggggtgtatgtgtgtgtgt

SEQ ID NO: 25634 - DNA, 20 bp, Artificial Sequence
  EML4 Forward Primer
gtggttcagattcagcccat

SEQ ID NO: 25635 - DNA, 23 bp, Artificial Sequence
  EML4 Forward Primer
caagtcttgattccatcagcttt

SEQ ID NO: 25636 - DNA, 20 bp, Artificial Sequence
  EML4 Forward Primer
ggcataaacagacttgggga

SEQ ID NO: 25637 - DNA, 20 bp, Artificial Sequence
  EML4 Forward Primer
atcttcatggggtgtatcgc

SEQ ID NO: 25638 - DNA, 20 bp, Artificial Sequence
  EML4 Forward Primer
tccacaaattcgagcatcac

SEQ ID NO: 25639 - DNA, 21 bp, Artificial Sequence
  EML4 Forward Primer
tctgatgaaaagaaggcagga

SEQ ID NO: 25640 - DNA, 20 bp, Artificial Sequence
  EML4 Forward Primer
tttcagttttgggtcttggg

SEQ ID NO: 25641 - DNA, 20 bp, Artificial Sequence
  EML4 Forward Primer
cgctaatggaaattgggaaa

SEQ ID NO: 25642 - DNA, 21 bp, Artificial Sequence
  EML4 Forward Primer
tcttctttgtcccagcatctt

SEQ ID NO: 25643 - DNA, 25 bp, Artificial Sequence
  EML4 Forward Primer
cattggtaaaattgtccctaaagat

SEQ ID NO: 25644 - DNA, 20 bp, Artificial Sequence
  EML4 Forward Primer
cagatttgggaattgccttg

SEQ ID NO: 25645 - DNA, 22 bp, Artificial Sequence
  EML4 Forward Primer
aagatgtcatcatcaaccaagg

SEQ ID NO: 25646 - DNA, 23 bp, Artificial Sequence
  EML4 Forward Primer
gagggagttttctcccttaaaaa

SEQ ID NO: 25647 - DNA, 20 bp, Artificial Sequence
  EML4 Forward Primer
agagagcagacttttggcga

SEQ ID NO: 25648 - DNA, 24 bp, Artificial Sequence
  EML4 Forward Primer
gtggatttttacttctttcgttcc

SEQ ID NO: 25649 - DNA, 20 bp, Artificial Sequence
  EML4 Forward Primer
gtggttggtcctggctctta

SEQ ID NO: 25650 - DNA, 22 bp, Artificial Sequence
  EML4 Forward Primer
ccagagagtggttttaccattg

SEQ ID NO: 25651 - DNA, 23 bp, Artificial Sequence
  EML4 Forward Primer
tggcatattcacaacacattttc

SEQ ID NO: 25652 - DNA, 20 bp, Artificial Sequence
  EML4 Forward Primer
ggcagaagtcaggaaactgg

SEQ ID NO: 25653 - DNA, 25 bp, Artificial Sequence
  EML4 Forward Primer
ttcactttggtgagttactgatttt

SEQ ID NO: 25654 - DNA, 23 bp, Artificial Sequence
  EML4 Forward Primer
ttgaggaaaaaggaagtcatcaa

SEQ ID NO: 25655 - DNA, 20 bp, Artificial Sequence
  EML4 Forward Primer
gaacagaggaagccgttcat

SEQ ID NO: 25656 - DNA, 20 bp, Artificial Sequence
  EML4 Forward Primer
tgggagaagctgaaaattcc

SEQ ID NO: 25657 - DNA, 20 bp, Artificial Sequence
  EML4 Forward Primer
cttgaatgcaggtgcttttg

SEQ ID NO: 25658 - DNA, 20 bp, Artificial Sequence
  EML4 Forward Primer
agcagagccagggtgttaaa

SEQ ID NO: 25659 - DNA, 22 bp, Artificial Sequence
  EML4 Forward Primer
cccaataaagtcatttcaagca

SEQ ID NO: 25660 - DNA, 23 bp, Artificial Sequence
  EML4 Forward Primer
tttttcagacccaagttttatgc

SEQ ID NO: 25661 - DNA, 20 bp, Artificial Sequence
  EML4 Forward Primer
agccttccaaaaatggtcct

SEQ ID NO: 25662 - DNA, 20 bp, Artificial Sequence
  EML4 Forward Primer
gtttgggggaggctttttag

SEQ ID NO: 25663 - DNA, 21 bp, Artificial Sequence
  EML4 Forward Primer
tgcctgaatttttccttttcc

SEQ ID NO: 25664 - DNA, 20 bp, Artificial Sequence
  EML4 Forward Primer
ggtgaaggacacagaaggga

SEQ ID NO: 25665 - DNA, 20 bp, Artificial Sequence
  EML4 Forward Primer
tgtgtctggggaaatgaaca

SEQ ID NO: 25666 - DNA, 21 bp, Artificial Sequence
  EML4 Forward Primer
tcatgaggcaggtagttttcc

SEQ ID NO: 25667 - DNA, 20 bp, Artificial Sequence
  EML4 Forward Primer
gtgcaggccaaaggtatgtt

SEQ ID NO: 25668 - DNA, 23 bp, Artificial Sequence
  EML4 Forward Primer
gagtggtcataaatccctttcaa

SEQ ID NO: 25669 - DNA, 21 bp, Artificial Sequence
  EML4 Forward Primer
gccagaaattgtttgaagtgc

SEQ ID NO: 25670 - DNA, 24 bp, Artificial Sequence
  EML4 Forward Primer
aaaggatgagatatctgccttcag

SEQ ID NO: 25671 - DNA, 20 bp, Artificial Sequence
  EML4 Forward Primer
catacctcacaggggctgtt

SEQ ID NO: 25672 - DNA, 20 bp, Artificial Sequence
  EML4 Forward Primer
cattctcctgcacttcctcc

SEQ ID NO: 25673 - DNA, 20 bp, Artificial Sequence
  EML4 Forward Primer
cccccacgatttgtaatttt

SEQ ID NO: 25674 - DNA, 20 bp, Artificial Sequence
  EML4 Forward Primer
ccgtccaggacatgagtttt

SEQ ID NO: 25675 - DNA, 20 bp, Artificial Sequence
  EML4 Forward Primer
actcagcgacactacctggg

SEQ ID NO: 25676 - DNA, 23 bp, Artificial Sequence
  EML4 Forward Primer
ttgaagctttattcttttgggaa

SEQ ID NO: 25677 - DNA, 22 bp, Artificial Sequence
  EML4 Forward Primer
gctggcacctgtatctttatcc

SEQ ID NO: 25678 - DNA, 21 bp, Artificial Sequence
  EML4 Forward Primer
gctgtaaagaatgaggaagca

SEQ ID NO: 25679 - DNA, 21 bp, Artificial Sequence
  EML4 Forward Primer
tgtgaagatgctcattgctgt

SEQ ID NO: 25680 - DNA, 22 bp, Artificial Sequence
  EML4 Forward Primer
tgatgattgtttgatttgctga

SEQ ID NO: 25681 - DNA, 26 bp, Artificial Sequence
  EML4 Forward Primer
tgaggaatttctagtataagcatgga

SEQ ID NO: 25682 - DNA, 25 bp, Artificial Sequence
  EML4 Forward Primer
cctgtagtgcataggattaaatgaa

SEQ ID NO: 25683 - DNA, 20 bp, Artificial Sequence
  EML4 Forward Primer
ttttgcagcctctacaaccc

SEQ ID NO: 25684 - DNA, 20 bp, Artificial Sequence
  EML4 Forward Primer
ggatgcatttttgccttacc

SEQ ID NO: 25685 - DNA, 24 bp, Artificial Sequence
  EML4 Forward Primer
ggagataagaggtcataaaggcaa

SEQ ID NO: 25686 - DNA, 25 bp, Artificial Sequence
  EML4 Forward Primer
attgtaaagcatatttcacaaatga

SEQ ID NO: 25687 - DNA, 25 bp, Artificial Sequence
  EML4 Forward Primer
tcaaactgtcaaaatttagtgagga

SEQ ID NO: 25688 - DNA, 22 bp, Artificial Sequence
  EML4 Forward Primer
tgtttcagagagcgatgagttt

SEQ ID NO: 25689 - DNA, 22 bp, Artificial Sequence
  EML4 Forward Primer
caagcaacttgaagcaatttca

SEQ ID NO: 25690 - DNA, 20 bp, Artificial Sequence
  EML4 Forward Primer
aatgcattgaagctgggttt

SEQ ID NO: 25691 - DNA, 21 bp, Artificial Sequence
  EML4 Forward Primer
gggaagttgcatgaaaatgaa

SEQ ID NO: 25692 - DNA, 20 bp, Artificial Sequence
  EML4 Forward Primer
caaccaccagtttcatccct

SEQ ID NO: 25693 - DNA, 21 bp, Artificial Sequence
  EML4 Forward Primer
tgaaggggaagaaatagggaa

SEQ ID NO: 25694 - DNA, 20 bp, Artificial Sequence
  EML4 Forward Primer
ctggcccaaattgttcatct

SEQ ID NO: 25695 - DNA, 20 bp, Artificial Sequence
  EML4 Forward Primer
ctggaaaggggatctagggt

SEQ ID NO: 25696 - DNA, 20 bp, Artificial Sequence
  EML4 Forward Primer
atgatgggtatgctgggaat

SEQ ID NO: 25697 - DNA, 23 bp, Artificial Sequence
  EML4 Forward Primer
ggacatcaaatttaaatcatccc

SEQ ID NO: 25698 - DNA, 19 bp, Artificial Sequence
  EML4 Forward Primer
ctggagcggcaattcacta

SEQ ID NO: 25699 - DNA, 22 bp, Artificial Sequence
  EML4 Forward Primer
tgagcaagtcaccaacatacct

SEQ ID NO: 25700 - DNA, 20 bp, Artificial Sequence
  EML4 Forward Primer
acaggtcctctttgcccttt

SEQ ID NO: 25701 - DNA, 20 bp, Artificial Sequence
  EML4 Forward Primer
cagggcaacatgtcctttct

SEQ ID NO: 25702 - DNA, 20 bp, Artificial Sequence
  EML4 Forward Primer
aagaatggcagtgggttgag

SEQ ID NO: 25703 - DNA, 20 bp, Artificial Sequence
  EML4 Forward Primer
ggggacaggaagaagaggtt

SEQ ID NO: 25704 - DNA, 20 bp, Artificial Sequence
  EML4 Forward Primer
ctgcacctgtggcagtctta

SEQ ID NO: 25705 - DNA, 27 bp, Artificial Sequence
  EML4 Forward Primer
ttttctgtttcttaagtaggtatgagg

SEQ ID NO: 25706 - DNA, 20 bp, Artificial Sequence
  EML4 Forward Primer
gcacagaaagccttccaaac

SEQ ID NO: 25707 - DNA, 21 bp, Artificial Sequence
  EML4 Forward Primer
caggcccataagaaagacatc

SEQ ID NO: 25708 - DNA, 20 bp, Artificial Sequence
  EML4 Forward Primer
ttttccatcattctgggagg

SEQ ID NO: 25709 - DNA, 20 bp, Artificial Sequence
  EML4 Forward Primer
gtgtcctccctctcgtggta

SEQ ID NO: 25710 - DNA, 23 bp, Artificial Sequence
  EML4 Forward Primer
ttcatcagttgaggaacagtttt

SEQ ID NO: 25711 - DNA, 20 bp, Artificial Sequence
  EML4 Forward Primer
ccttaaaagggggcaaaata

SEQ ID NO: 25712 - DNA, 20 bp, Artificial Sequence
  EML4 Forward Primer
tagtgcccccatatctcagc

SEQ ID NO: 25713 - DNA, 20 bp, Artificial Sequence
  EML4 Forward Primer
gctttgcacaaaagacttgc

SEQ ID NO: 25714 - DNA, 20 bp, Artificial Sequence
  EML4 Forward Primer
tggaggagggaaagacagaa

SEQ ID NO: 25715 - DNA, 22 bp, Artificial Sequence
  EML4 Forward Primer
aaaccagagcaaatgtcacaaa

SEQ ID NO: 25716 - DNA, 21 bp, Artificial Sequence
  EML4 Forward Primer
cactccttcctttcccatttc

SEQ ID NO: 25717 - DNA, 20 bp, Artificial Sequence
  EML4 Forward Primer
gctgtagcagaaggaaaggc

SEQ ID NO: 25718 - DNA, 20 bp, Artificial Sequence
  EML4 Forward Primer
tgtgcctgtggaactcaatg

SEQ ID NO: 25719 - DNA, 20 bp, Artificial Sequence
  EML4 Forward Primer
gcattgcagttggattcagt

SEQ ID NO: 25720 - DNA, 20 bp, Artificial Sequence
  EML4 Forward Primer
cagcatatccccttcatgct

SEQ ID NO: 25721 - DNA, 20 bp, Artificial Sequence
  EML4 Forward Primer
ataggaacgcactcaggcag

SEQ ID NO: 25722 - DNA, 20 bp, Artificial Sequence
  EML4 Forward Primer
ggagtgcagttgcaaaatga

SEQ ID NO: 25723 - DNA, 21 bp, Artificial Sequence
  EML4 Forward Primer
agacctgtcttgcagaccttg

SEQ ID NO: 25724 - DNA, 20 bp, Artificial Sequence
  EML4 Forward Primer
tagcgatttttccttctggc

SEQ ID NO: 25725 - DNA, 20 bp, Artificial Sequence
  EML4 Forward Primer
ggctagctcagatcttcccc

SEQ ID NO: 25726 - DNA, 20 bp, Artificial Sequence
  EML4 Forward Primer
gagctcaggttctgcatggt

SEQ ID NO: 25727 - DNA, 20 bp, Artificial Sequence
  EML4 Forward Primer
gccccaatttgtagggaaaa

SEQ ID NO: 25728 - DNA, 23 bp, Artificial Sequence
  EML4 Forward Primer
gggattgattagaatctagggga

SEQ ID NO: 25729 - DNA, 18 bp, Artificial Sequence
  EML4 Forward Primer
ccatcatggtggctcagg

SEQ ID NO: 25730 - DNA, 20 bp, Artificial Sequence
  EML4 Forward Primer
acttaggcacggttttggtg

SEQ ID NO: 25731 - DNA, 20 bp, Artificial Sequence
  EML4 Forward Primer
tcccatccattttcttcctg

SEQ ID NO: 25732 - DNA, 20 bp, Artificial Sequence
  EML4 Forward Primer
tatccctggtcttaccacgc

SEQ ID NO: 25733 - DNA, 20 bp, Artificial Sequence
  EML4 Forward Primer
ggcttgctactgttccctca

SEQ ID NO: 25734 - DNA, 23 bp, Artificial Sequence
  EML4 Forward Primer
tcccaacttagtgtcttcttcaa

SEQ ID NO: 25735 - DNA, 20 bp, Artificial Sequence
  EML4 Forward Primer
ctggatgcagaaaccagaga

SEQ ID NO: 25736 - DNA, 21 bp, Artificial Sequence
  EML4 Forward Primer
tgtcacatctggttagcaagc

SEQ ID NO: 25737 - DNA, 20 bp, Artificial Sequence
  EML4 Forward Primer
cacaccactcttccctggag

SEQ ID NO: 25738 - DNA, 20 bp, Artificial Sequence
  EML4 Forward Primer
gggaaggacaccacaaaaga

SEQ ID NO: 25739 - DNA, 20 bp, Artificial Sequence
  EML4 Forward Primer
ggtaccttcctggctgtagg

SEQ ID NO: 25740 - DNA, 20 bp, Artificial Sequence
  EML4 Forward Primer
catcagagttccctgtgtgc

SEQ ID NO: 25741 - DNA, 21 bp, Artificial Sequence
  EML4 Forward Primer
tcacttctctgccactgaaaa

SEQ ID NO: 25742 - DNA, 23 bp, Artificial Sequence
  EML4 Forward Primer
ccacaaaacagttcattttaggg

SEQ ID NO: 25743 - DNA, 26 bp, Artificial Sequence
  EML4 Forward Primer
caacttcagagtttagaatttgtcca

SEQ ID NO: 25744 - DNA, 20 bp, Artificial Sequence
  EML4 Forward Primer
ccctgtagcacttagcccac

SEQ ID NO: 25745 - DNA, 21 bp, Artificial Sequence
  EML4 Forward Primer
gcaagtttgtcaaatgcatga

SEQ ID NO: 25746 - DNA, 20 bp, Artificial Sequence
  EML4 Forward Primer
taggacaggcaaaactgggt

SEQ ID NO: 25747 - DNA, 20 bp, Artificial Sequence
  EML4 Forward Primer
ctgcagaagcacagtacgct

SEQ ID NO: 25748 - DNA, 20 bp, Artificial Sequence
  EML4 Forward Primer
gagcctgggttgtacctacg

SEQ ID NO: 25749 - DNA, 20 bp, Artificial Sequence
  EML4 Forward Primer
tcgaagatcttagcccagga

SEQ ID NO: 25750 - DNA, 20 bp, Artificial Sequence
  EML4 Forward Primer
aactccagccatcatcacct

SEQ ID NO: 25751 - DNA, 25 bp, Artificial Sequence
  EML4 Forward Primer
gagaataaacatagcaacaaaagca

SEQ ID NO: 25752 - DNA, 20 bp, Artificial Sequence
  EML4 Forward Primer
catggttgggaataagcaga

SEQ ID NO: 25753 - DNA, 20 bp, Artificial Sequence
  EML4 Forward Primer
ctgcattggactgcactgat

SEQ ID NO: 25754 - DNA, 20 bp, Artificial Sequence
  EML4 Forward Primer
acaataatgaaagggccagc

SEQ ID NO: 25755 - DNA, 20 bp, Artificial Sequence
  EML4 Forward Primer
ttgatgccaggcagaaaata

SEQ ID NO: 25756 - DNA, 20 bp, Artificial Sequence
  EML4 Forward Primer
gcctgtactttgccatgacc

SEQ ID NO: 25757 - DNA, 24 bp, Artificial Sequence
  EML4 Forward Primer
gatttcagaaagcttcacttctca

SEQ ID NO: 25758 - DNA, 22 bp, Artificial Sequence
  EML4 Forward Primer
tttgaccacagactgtaggagg

SEQ ID NO: 25759 - DNA, 20 bp, Artificial Sequence
  EML4 Forward Primer
ggtgaattttccccaaaaca

SEQ ID NO: 25760 - DNA, 20 bp, Artificial Sequence
  EML4 Forward Primer
gtgctgaggatttgctgtga

SEQ ID NO: 25761 - DNA, 20 bp, Artificial Sequence
  EML4 Forward Primer
cagagaatgcttgccaacct

SEQ ID NO: 25762 - DNA, 21 bp, Artificial Sequence
  EML4 Forward Primer
cttccatgggaaacagtttgt

SEQ ID NO: 25763 - DNA, 20 bp, Artificial Sequence
  EML4 Forward Primer
aaggacattgattggacgac

SEQ ID NO: 25764 - DNA, 20 bp, Artificial Sequence
  EML4 Forward Primer
tggggcttcttcctaatctg

SEQ ID NO: 25765 - DNA, 20 bp, Artificial Sequence
  EML4 Forward Primer
tgaaaattgggttctccagc

SEQ ID NO: 25766 - DNA, 20 bp, Artificial Sequence
  EML4 Forward Primer
aagtggccaacatctcaacc

SEQ ID NO: 25767 - DNA, 21 bp, Artificial Sequence
  EML4 Forward Primer
ctccacttcgaagacttggtg

SEQ ID NO: 25768 - DNA, 20 bp, Artificial Sequence
  EML4 Forward Primer
tgcatccctgtgtttccata

SEQ ID NO: 25769 - DNA, 20 bp, Artificial Sequence
  EML4 Forward Primer
atccaggcagtgcttgtctt

SEQ ID NO: 25770 - DNA, 22 bp, Artificial Sequence
  EML4 Forward Primer
aagctctggcaagtatacgacc

SEQ ID NO: 25771 - DNA, 20 bp, Artificial Sequence
  EML4 Forward Primer
agccatgtcaccaatgtcag

SEQ ID NO: 25772 - DNA, 20 bp, Artificial Sequence
  EML4 Forward Primer
aggaggagagtgaagagggc

SEQ ID NO: 25773 - DNA, 22 bp, Artificial Sequence
  EML4 Forward Primer
ttgagattttggtttccatgtg

SEQ ID NO: 25774 - DNA, 21 bp, Artificial Sequence
  EML4 Forward Primer
ttcttcaggaacaaccagagg

SEQ ID NO: 25775 - DNA, 22 bp, Artificial Sequence
  EML4 Forward Primer
ggtgctgccttttctaagtcat

SEQ ID NO: 25776 - DNA, 21 bp, Artificial Sequence
  EML4 Forward Primer
tggctaatttcagctaagcct

SEQ ID NO: 25777 - DNA, 21 bp, Artificial Sequence
  EML4 Forward Primer
ggctatcctactcttttgggc

SEQ ID NO: 25778 - DNA, 20 bp, Artificial Sequence
  EML4 Forward Primer
caggcgtttacgtgattgtg

SEQ ID NO: 25779 - DNA, 20 bp, Artificial Sequence
  EML4 Forward Primer
ttccaagcaacccatctttc

SEQ ID NO: 25780 - DNA, 20 bp, Artificial Sequence
  EML4 Forward Primer
acctttggggttgccatgta

SEQ ID NO: 25781 - DNA, 20 bp, Artificial Sequence
  EML4 Forward Primer
ttgagccattgctatcatgc

SEQ ID NO: 25782 - DNA, 20 bp, Artificial Sequence
  EML4 Reverse Primer
cttactaccccagggcgaac

SEQ ID NO: 25783 - DNA, 20 bp, Artificial Sequence
  EML4 Reverse Primer
tgtgtcagaccctcctttcc

SEQ ID NO: 25784 - DNA, 20 bp, Artificial Sequence
  EML4 Reverse Primer
gaagcatcggagcatcattt

SEQ ID NO: 25785 - DNA, 20 bp, Artificial Sequence
  EML4 Reverse Primer
gctgaagtgccttttcagtg

SEQ ID NO: 25786 - DNA, 23 bp, Artificial Sequence
  EML4 Reverse Primer
cgcctttcttttacatttcttga

SEQ ID NO: 25787 - DNA, 20 bp, Artificial Sequence
  EML4 Reverse Primer
ggaggcaactgagtgttgtg

SEQ ID NO: 25788 - DNA, 21 bp, Artificial Sequence
  EML4 Reverse Primer
tcatcctgtaggagtggtgag

SEQ ID NO: 25789 - DNA, 20 bp, Artificial Sequence
  EML4 Reverse Primer
aagatgaattgcagttgggg

SEQ ID NO: 25790 - DNA, 20 bp, Artificial Sequence
  EML4 Reverse Primer
tcccccttgcaagagtaaaa

SEQ ID NO: 25791 - DNA, 20 bp, Artificial Sequence
  EML4 Reverse Primer
cgtgaagttcttctggggtt

SEQ ID NO: 25792 - DNA, 20 bp, Artificial Sequence
  EML4 Reverse Primer
cccttgattgttgcatgttt

SEQ ID NO: 25793 - DNA, 22 bp, Artificial Sequence
  EML4 Reverse Primer
ggcagcactttagaaacctttt

SEQ ID NO: 25794 - DNA, 22 bp, Artificial Sequence
  EML4 Reverse Primer
ttcttccccctaagaaaaatca

SEQ ID NO: 25795 - DNA, 21 bp, Artificial Sequence
  EML4 Reverse Primer
ccatttgtatgcagctgatgt

SEQ ID NO: 25796 - DNA, 21 bp, Artificial Sequence
  EML4 Reverse Primer
tcctgaatcagcttcttttcc

SEQ ID NO: 25797 - DNA, 20 bp, Artificial Sequence
  EML4 Reverse Primer
gccatgctttgattgtgcta

SEQ ID NO: 25798 - DNA, 21 bp, Artificial Sequence
  EML4 Reverse Primer
tcgtgtgatattgcttcatgg

SEQ ID NO: 25799 - DNA, 20 bp, Artificial Sequence
  EML4 Reverse Primer
gccaaaaacaacaactgcaa

SEQ ID NO: 25800 - DNA, 20 bp, Artificial Sequence
  EML4 Reverse Primer
aagcaggttgtctgcatggt

SEQ ID NO: 25801 - DNA, 20 bp, Artificial Sequence
  EML4 Reverse Primer
tccagatggggaacatccta

SEQ ID NO: 25802 - DNA, 21 bp, Artificial Sequence
  EML4 Reverse Primer
tgtgtaaataaagccaacggg

SEQ ID NO: 25803 - DNA, 20 bp, Artificial Sequence
  EML4 Reverse Primer
ggctccaagaatatgttccg

SEQ ID NO: 25804 - DNA, 20 bp, Artificial Sequence
  EML4 Reverse Primer
gcattccattccagatggtc

SEQ ID NO: 25805 - DNA, 20 bp, Artificial Sequence
  EML4 Reverse Primer
ggtgatacaacctgtgtggg

SEQ ID NO: 25806 - DNA, 21 bp, Artificial Sequence
  EML4 Reverse Primer
ttcaggacctacatccagtca

SEQ ID NO: 25807 - DNA, 20 bp, Artificial Sequence
  EML4 Reverse Primer
cacctggctctcacctacct

SEQ ID NO: 25808 - DNA, 23 bp, Artificial Sequence
  EML4 Reverse Primer
gcacatttgattttccttacaga

SEQ ID NO: 25809 - DNA, 22 bp, Artificial Sequence
  EML4 Reverse Primer
ttttctctcctttgtgcaatga

SEQ ID NO: 25810 - DNA, 20 bp, Artificial Sequence
  EML4 Reverse Primer
cagccttgggttaaggttga

SEQ ID NO: 25811 - DNA, 20 bp, Artificial Sequence
  EML4 Reverse Primer
ccaaaataaggagatgccga

SEQ ID NO: 25812 - DNA, 23 bp, Artificial Sequence
  EML4 Reverse Primer
gagcaagcttttgagaatcattt

SEQ ID NO: 25813 - DNA, 20 bp, Artificial Sequence
  EML4 Reverse Primer
gcctttcaaaatacggtgct

SEQ ID NO: 25814 - DNA, 22 bp, Artificial Sequence
  EML4 Reverse Primer
ggtgatggtgttttacaaccag

SEQ ID NO: 25815 - DNA, 20 bp, Artificial Sequence
  EML4 Reverse Primer
agtctcttccctcccattcc

SEQ ID NO: 25816 - DNA, 22 bp, Artificial Sequence
  EML4 Reverse Primer
cagtgaatgatgggaaatcaga

SEQ ID NO: 25817 - DNA, 20 bp, Artificial Sequence
  EML4 Reverse Primer
ggccagatttggctgtgtag

SEQ ID NO: 25818 - DNA, 20 bp, Artificial Sequence
  EML4 Reverse Primer
accatgggaagtgtgtgtca

SEQ ID NO: 25819 - DNA, 20 bp, Artificial Sequence
  EML4 Reverse Primer
gcaggactttggtcctgtta

SEQ ID NO: 25820 - DNA, 21 bp, Artificial Sequence
  EML4 Reverse Primer
gagcatcatttgtaaacccca

SEQ ID NO: 25821 - DNA, 20 bp, Artificial Sequence
  EML4 Reverse Primer
gaaacactgtgcctgacctg

SEQ ID NO: 25822 - DNA, 20 bp, Artificial Sequence
  EML4 Reverse Primer
ctgcttggccaggatcttta

SEQ ID NO: 25823 - DNA, 23 bp, Artificial Sequence
  EML4 Reverse Primer
ttgcatggttagctagttcattg

SEQ ID NO: 25824 - DNA, 25 bp, Artificial Sequence
  EML4 Reverse Primer
tgtatcatactcagtttttatgcca

SEQ ID NO: 25825 - DNA, 20 bp, Artificial Sequence
  EML4 Reverse Primer
gatttgtgccagcttttggt

SEQ ID NO: 25826 - DNA, 20 bp, Artificial Sequence
  EML4 Reverse Primer
ctttggaagcttgtgcaaat

SEQ ID NO: 25827 - DNA, 20 bp, Artificial Sequence
  EML4 Reverse Primer
tgccaatcatttagcccttc

SEQ ID NO: 25828 - DNA, 20 bp, Artificial Sequence
  EML4 Reverse Primer
gctggcgagaagattagagg

SEQ ID NO: 25829 - DNA, 20 bp, Artificial Sequence
  EML4 Reverse Primer
acagtaaccaccctgcctcc

SEQ ID NO: 25830 - DNA, 21 bp, Artificial Sequence
  EML4 Reverse Primer
tggtaaagaaaaagaaccccc

SEQ ID NO: 25831 - DNA, 20 bp, Artificial Sequence
  EML4 Reverse Primer
cagatgtgctccacctcaaa

SEQ ID NO: 25832 - DNA, 23 bp, Artificial Sequence
  EML4 Reverse Primer
cagagaccagtttgctacaggtt

SEQ ID NO: 25833 - DNA, 20 bp, Artificial Sequence
  EML4 Reverse Primer
ggtggaattgaaagctggaa

SEQ ID NO: 25834 - DNA, 20 bp, Artificial Sequence
  EML4 Reverse Primer
aggggccaaaagttgaaagt

SEQ ID NO: 25835 - DNA, 20 bp, Artificial Sequence
  EML4 Reverse Primer
ggaggagagcagctaggatg

SEQ ID NO: 25836 - DNA, 20 bp, Artificial Sequence
  EML4 Reverse Primer
agctggaatggaagtggtgt

SEQ ID NO: 25837 - DNA, 20 bp, Artificial Sequence
  EML4 Reverse Primer
aaattatggcctttgctcca

SEQ ID NO: 25838 - DNA, 21 bp, Artificial Sequence
  EML4 Reverse Primer
tcctcaagttcagcagtttga

SEQ ID NO: 25839 - DNA, 20 bp, Artificial Sequence
  EML4 Reverse Primer
gctgcctgctgtattctcct

SEQ ID NO: 25840 - DNA, 20 bp, Artificial Sequence
  EML4 Reverse Primer
tccatctgtggtagcccttt

SEQ ID NO: 25841 - DNA, 21 bp, Artificial Sequence
  EML4 Reverse Primer
tgccacatgtataggcacaaa

SEQ ID NO: 25842 - DNA, 22 bp, Artificial Sequence
  EML4 Reverse Primer
tgaatggcttgctgtatttgtt

SEQ ID NO: 25843 - DNA, 21 bp, Artificial Sequence
  EML4 Reverse Primer
ccaaagaactttgattcgagg

SEQ ID NO: 25844 - DNA, 21 bp, Artificial Sequence
  EML4 Reverse Primer
aaactaatttcagcttgccca

SEQ ID NO: 25845 - DNA, 20 bp, Artificial Sequence
  EML4 Reverse Primer
agaattccctaatttggccc

SEQ ID NO: 25846 - DNA, 22 bp, Artificial Sequence
  EML4 Reverse Primer
gtcctggattcaaattctgacc

SEQ ID NO: 25847 - DNA, 20 bp, Artificial Sequence
  EML4 Reverse Primer
ttagggttgtttgcctctgc

SEQ ID NO: 25848 - DNA, 20 bp, Artificial Sequence
  EML4 Reverse Primer
caacttatgagggccagagg

SEQ ID NO: 25849 - DNA, 20 bp, Artificial Sequence
  EML4 Reverse Primer
tcggacatcagtatgcgaga

SEQ ID NO: 25850 - DNA, 20 bp, Artificial Sequence
  EML4 Reverse Primer
tgagacagggtctcgttctg

SEQ ID NO: 25851 - DNA, 20 bp, Artificial Sequence
  EML4 Reverse Primer
tttggaaactcaaggcccta

SEQ ID NO: 25852 - DNA, 24 bp, Artificial Sequence
  EML4 Reverse Primer
tcaaagtaatcagaaggtccatgt

SEQ ID NO: 25853 - DNA, 20 bp, Artificial Sequence
  EML4 Reverse Primer
tggtaggggtgtgaggctta

SEQ ID NO: 25854 - DNA, 21 bp, Artificial Sequence
  EML4 Reverse Primer
cctgtggattagtcccctctg

SEQ ID NO: 25855 - DNA, 26 bp, Artificial Sequence
  EML4 Reverse Primer
tgttgatggtttttaatttcctaatg

SEQ ID NO: 25856 - DNA, 20 bp, Artificial Sequence
  EML4 Reverse Primer
cccttcctcagctagtccct

SEQ ID NO: 25857 - DNA, 20 bp, Artificial Sequence
  EML4 Reverse Primer
gctgtgccctgtgttctgta

SEQ ID NO: 25858 - DNA, 27 bp, Artificial Sequence
  EML4 Reverse Primer
ccttaacgtacagaaaaagtacactca

SEQ ID NO: 25859 - DNA, 20 bp, Artificial Sequence
  EML4 Reverse Primer
acccagtctcctgttggact

SEQ ID NO: 25860 - DNA, 27 bp, Artificial Sequence
  EML4 Reverse Primer
aaaattaaggatattgatgacttgttt

SEQ ID NO: 25861 - DNA, 19 bp, Artificial Sequence
  EML4 Reverse Primer
gcgggagtcacagatcact

SEQ ID NO: 25862 - DNA, 24 bp, Artificial Sequence
  EML4 Reverse Primer
tcctagagtttacagcggattttt

SEQ ID NO: 25863 - DNA, 20 bp, Artificial Sequence
  EML4 Reverse Primer
ccaaacaatgagtgcttgct

SEQ ID NO: 25864 - DNA, 20 bp, Artificial Sequence
  EML4 Reverse Primer
tgcaaaagcaacagacaagg

SEQ ID NO: 25865 - DNA, 23 bp, Artificial Sequence
  EML4 Reverse Primer
gggatacagtcctcctgtactga

SEQ ID NO: 25866 - DNA, 21 bp, Artificial Sequence
  EML4 Reverse Primer
cattgcttgattgctgaactg

SEQ ID NO: 25867 - DNA, 20 bp, Artificial Sequence
  EML4 Reverse Primer
ttccctctctccctgctaca

SEQ ID NO: 25868 - DNA, 24 bp, Artificial Sequence
  EML4 Reverse Primer
aagacatgctttgaagtagctgaa

SEQ ID NO: 25869 - DNA, 21 bp, Artificial Sequence
  EML4 Reverse Primer
aaacatccccatgaaaacaca

SEQ ID NO: 25870 - DNA, 20 bp, Artificial Sequence
  EML4 Reverse Primer
gcctacttctggattgctgg

SEQ ID NO: 25871 - DNA, 20 bp, Artificial Sequence
  EML4 Reverse Primer
ttccctccctgcagatagaa

SEQ ID NO: 25872 - DNA, 27 bp, Artificial Sequence
  EML4 Reverse Primer
cctttatggtaaaataatgtattggat

SEQ ID NO: 25873 - DNA, 23 bp, Artificial Sequence
  EML4 Reverse Primer
ggaatgaagttgatgagttttgc

SEQ ID NO: 25874 - DNA, 22 bp, Artificial Sequence
  EML4 Reverse Primer
gctcttaaaatggcactgcttt

SEQ ID NO: 25875 - DNA, 27 bp, Artificial Sequence
  EML4 Reverse Primer
agaaggtcacttaatgttaaaaatgat

SEQ ID NO: 25876 - DNA, 22 bp, Artificial Sequence
  EML4 Reverse Primer
tgatctaggtgtgggtttagca

SEQ ID NO: 25877 - DNA, 20 bp, Artificial Sequence
  EML4 Reverse Primer
acccattcaccacgagagag

SEQ ID NO: 25878 - DNA, 20 bp, Artificial Sequence
  EML4 Reverse Primer
ctgacctcttggttgggcta

SEQ ID NO: 25879 - DNA, 20 bp, Artificial Sequence
  EML4 Reverse Primer
cttcttccagattccccctc

SEQ ID NO: 25880 - DNA, 20 bp, Artificial Sequence
  EML4 Reverse Primer
tctgttggttccttccctca

SEQ ID NO: 25881 - DNA, 20 bp, Artificial Sequence
  EML4 Reverse Primer
ttggccctattcctttctca

SEQ ID NO: 25882 - DNA, 21 bp, Artificial Sequence
  EML4 Reverse Primer
tctcacaagctttttccctga

SEQ ID NO: 25883 - DNA, 25 bp, Artificial Sequence
  EML4 Reverse Primer
tgttacaattcatgtggatttcatt

SEQ ID NO: 25884 - DNA, 20 bp, Artificial Sequence
  EML4 Reverse Primer
gcctagggtttagccactcc

SEQ ID NO: 25885 - DNA, 20 bp, Artificial Sequence
  EML4 Reverse Primer
tcctacgcagacagaactgg

SEQ ID NO: 25886 - DNA, 25 bp, Artificial Sequence
  EML4 Reverse Primer
tgtgataaacatttgcctacacact

SEQ ID NO: 25887 - DNA, 21 bp, Artificial Sequence
  EML4 Reverse Primer
tctcatggtcttcactcaacg

SEQ ID NO: 25888 - DNA, 20 bp, Artificial Sequence
  EML4 Reverse Primer
tttatgccacaaaaccccag

SEQ ID NO: 25889 - DNA, 22 bp, Artificial Sequence
  EML4 Reverse Primer
tgtgtgagtgtctcactgtcct

SEQ ID NO: 25890 - DNA, 20 bp, Artificial Sequence
  EML4 Reverse Primer
tagggcatcatttcaccaca

SEQ ID NO: 25891 - DNA, 20 bp, Artificial Sequence
  EML4 Reverse Primer
agagactgactcatgccggt

SEQ ID NO: 25892 - DNA, 20 bp, Artificial Sequence
  EML4 Reverse Primer
tgagaatgggggcatcttag

SEQ ID NO: 25893 - DNA, 23 bp, Artificial Sequence
  EML4 Reverse Primer
aacactggaacactgtaactgga

SEQ ID NO: 25894 - DNA, 23 bp, Artificial Sequence
  EML4 Reverse Primer
tgtgttttggtgtgtgtctatca

SEQ ID NO: 25895 - DNA, 27 bp, Artificial Sequence
  EML4 Reverse Primer
aagcaaacagatagatgtatttagtca

SEQ ID NO: 25896 - DNA, 20 bp, Artificial Sequence
  EML4 Reverse Primer
agagtgaaagagggggcatt

SEQ ID NO: 25897 - DNA, 20 bp, Artificial Sequence
  EML4 Reverse Primer
cgtggctttgtgaaaggatg

SEQ ID NO: 25898 - DNA, 22 bp, Artificial Sequence
  EML4 Reverse Primer
gccctttgaaaaattgttcttg

SEQ ID NO: 25899 - DNA, 20 bp, Artificial Sequence
  EML4 Reverse Primer
tactgacttaatcgcggcct

SEQ ID NO: 25900 - DNA, 20 bp, Artificial Sequence
  EML4 Reverse Primer
cgcagagggtaaagtgaagc

SEQ ID NO: 25901 - DNA, 20 bp, Artificial Sequence
  EML4 Reverse Primer
ggcacaccctccttaaaaca

SEQ ID NO: 25902 - DNA, 22 bp, Artificial Sequence
  EML4 Reverse Primer
tttttaaatgttgtggtggtgg

SEQ ID NO: 25903 - DNA, 22 bp, Artificial Sequence
  EML4 Reverse Primer
tgcaagtcctttgtaattgctg

SEQ ID NO: 25904 - DNA, 20 bp, Artificial Sequence
  EML4 Reverse Primer
tgcttcctcatcattgttgg

SEQ ID NO: 25905 - DNA, 20 bp, Artificial Sequence
  EML4 Reverse Primer
agtacaggcacgagccactt

SEQ ID NO: 25906 - DNA, 20 bp, Artificial Sequence
  EML4 Reverse Primer
tgatgttttgaggcgtcttg

SEQ ID NO: 25907 - DNA, 20 bp, Artificial Sequence
  EML4 Reverse Primer
cagggcaggaactgaatcat

SEQ ID NO: 25908 - DNA, 20 bp, Artificial Sequence
  EML4 Reverse Primer
tgctctgagtttggagcaga

SEQ ID NO: 25909 - DNA, 20 bp, Artificial Sequence
  EML4 Reverse Primer
tagtgcagtcagccaaccag

SEQ ID NO: 25910 - DNA, 20 bp, Artificial Sequence
  EML4 Reverse Primer
ccattggattcggcatttac

SEQ ID NO: 25911 - DNA, 20 bp, Artificial Sequence
  EML4 Reverse Primer
ttgatgaggcaagtgtcctg

SEQ ID NO: 25912 - DNA, 20 bp, Artificial Sequence
  EML4 Reverse Primer
ggcgggatacttattgtgga

SEQ ID NO: 25913 - DNA, 27 bp, Artificial Sequence
  EML4 Reverse Primer
aaggtatttcagtaaagaaaattctga

SEQ ID NO: 25914 - DNA, 20 bp, Artificial Sequence
  EML4 Reverse Primer
ttctggagccacagaaccat

SEQ ID NO: 25915 - DNA, 20 bp, Artificial Sequence
  EML4 Reverse Primer
ttggcaactctgaacagctt

SEQ ID NO: 25916 - DNA, 23 bp, Artificial Sequence
  EML4 Reverse Primer
ttttagcccctgtgaaattagaa

SEQ ID NO: 25917 - DNA, 20 bp, Artificial Sequence
  EML4 Reverse Primer
atggtggtgatatgggaagg

SEQ ID NO: 25918 - DNA, 20 bp, Artificial Sequence
  EML4 Reverse Primer
ttttgacggcatgtgttcat

SEQ ID NO: 25919 - DNA, 20 bp, Artificial Sequence
  EML4 Reverse Primer
gaacccaaaggcaaaattga

SEQ ID NO: 25920 - DNA, 22 bp, Artificial Sequence
  EML4 Reverse Primer
gcttctttgtcacttccactca

SEQ ID NO: 25921 - DNA, 20 bp, Artificial Sequence
  EML4 Reverse Primer
catgaggcatgtgatggaga

SEQ ID NO: 25922 - DNA, 20 bp, Artificial Sequence
  EML4 Reverse Primer
tcccaaggctagctgagaaa

SEQ ID NO: 25923 - DNA, 23 bp, Artificial Sequence
  EML4 Reverse Primer
tttgtatttaggaactgtcaggc

SEQ ID NO: 25924 - DNA, 20 bp, Artificial Sequence
  EML4 Reverse Primer
ccactgccctgaaatcagtt

SEQ ID NO: 25925 - DNA, 20 bp, Artificial Sequence
  EML4 Reverse Primer
cattgtcttatcaccgccct

SEQ ID NO: 25926 - DNA, 20 bp, Artificial Sequence
  EML4 Reverse Primer
ttgattggtgcatggatgat

SEQ ID NO: 25927 - DNA, 20 bp, Artificial Sequence
  EML4 Reverse Primer
caggtctcctgcttcctgtc

SEQ ID NO: 25928 - DNA, 27 bp, Artificial Sequence
  EML4 Reverse Primer
cccaaatctttacttgactcttagtat

SEQ ID NO: 25929 - DNA, 20 bp, Artificial Sequence
  EML4 Reverse Primer
tggcatgggatttatggatt

SEQ ID NO: 25930 - DNA, 20 bp, Artificial Sequence
  EML4 Reverse Primer
ttttctaccaccccctcctt

SEQ ID NO: 25931 - DNA, 20 bp, Artificial Sequence
  EML4 Reverse Primer
cccatttatgaaagggggaa

SEQ ID NO: 25932 - DNA, 20 bp, Artificial Sequence
  EML4 Reverse Primer
gggggtgtatgtgtgtgtgt

SEQ ID NO: 25933 - DNA, 20 bp, Artificial Sequence
  EML4 Reverse Primer
gtggttcagattcagcccat

SEQ ID NO: 25934 - DNA, 23 bp, Artificial Sequence
  EML4 Reverse Primer
caagtcttgattccatcagcttt

SEQ ID NO: 25935 - DNA, 20 bp, Artificial Sequence
  EML4 Reverse Primer
ggcataaacagacttgggga

SEQ ID NO: 25936 - DNA, 20 bp, Artificial Sequence
  EML4 Reverse Primer
atcttcatggggtgtatcgc

SEQ ID NO: 25937 - DNA, 20 bp, Artificial Sequence
  EML4 Reverse Primer
tccacaaattcgagcatcac

SEQ ID NO: 25938 - DNA, 21 bp, Artificial Sequence
  EML4 Reverse Primer
tctgatgaaaagaaggcagga

SEQ ID NO: 25939 - DNA, 20 bp, Artificial Sequence
  EML4 Reverse Primer
tttcagttttgggtcttggg

SEQ ID NO: 25940 - DNA, 20 bp, Artificial Sequence
  EML4 Reverse Primer
cgctaatggaaattgggaaa

SEQ ID NO: 25941 - DNA, 21 bp, Artificial Sequence
  EML4 Reverse Primer
tcttctttgtcccagcatctt

SEQ ID NO: 25942 - DNA, 25 bp, Artificial Sequence
  EML4 Reverse Primer
cattggtaaaattgtccctaaagat

SEQ ID NO: 25943 - DNA, 20 bp, Artificial Sequence
  EML4 Reverse Primer
cagatttgggaattgccttg

SEQ ID NO: 25944 - DNA, 22 bp, Artificial Sequence
  EML4 Reverse Primer
aagatgtcatcatcaaccaagg

SEQ ID NO: 25945 - DNA, 23 bp, Artificial Sequence
  EML4 Reverse Primer
gagggagttttctcccttaaaaa

SEQ ID NO: 25946 - DNA, 20 bp, Artificial Sequence
  EML4 Reverse Primer
agagagcagacttttggcga

SEQ ID NO: 25947 - DNA, 24 bp, Artificial Sequence
  EML4 Reverse Primer
gtggatttttacttctttcgttcc

SEQ ID NO: 25948 - DNA, 20 bp, Artificial Sequence
  EML4 Reverse Primer
gtggttggtcctggctctta

SEQ ID NO: 25949 - DNA, 22 bp, Artificial Sequence
  EML4 Reverse Primer
ccagagagtggttttaccattg

SEQ ID NO: 25950 - DNA, 23 bp, Artificial Sequence
  EML4 Reverse Primer
tggcatattcacaacacattttc

SEQ ID NO: 25951 - DNA, 20 bp, Artificial Sequence
  EML4 Reverse Primer
ggcagaagtcaggaaactgg

SEQ ID NO: 25952 - DNA, 25 bp, Artificial Sequence
  EML4 Reverse Primer
ttcactttggtgagttactgatttt

SEQ ID NO: 25953 - DNA, 23 bp, Artificial Sequence
  EML4 Reverse Primer
ttgaggaaaaaggaagtcatcaa

SEQ ID NO: 25954 - DNA, 20 bp, Artificial Sequence
  EML4 Reverse Primer
gaacagaggaagccgttcat

SEQ ID NO: 25955 - DNA, 20 bp, Artificial Sequence
  EML4 Reverse Primer
tgggagaagctgaaaattcc

SEQ ID NO: 25956 - DNA, 20 bp, Artificial Sequence
  EML4 Reverse Primer
cttgaatgcaggtgcttttg

SEQ ID NO: 25957 - DNA, 20 bp, Artificial Sequence
  EML4 Reverse Primer
agcagagccagggtgttaaa

SEQ ID NO: 25958 - DNA, 22 bp, Artificial Sequence
  EML4 Reverse Primer
cccaataaagtcatttcaagca

SEQ ID NO: 25959 - DNA, 23 bp, Artificial Sequence
  EML4 Reverse Primer
tttttcagacccaagttttatgc

SEQ ID NO: 25960 - DNA, 20 bp, Artificial Sequence
  EML4 Reverse Primer
agccttccaaaaatggtcct

SEQ ID NO: 25961 - DNA, 20 bp, Artificial Sequence
  EML4 Reverse Primer
gtttgggggaggctttttag

SEQ ID NO: 25962 - DNA, 21 bp, Artificial Sequence
  EML4 Reverse Primer
tgcctgaatttttccttttcc

SEQ ID NO: 25963 - DNA, 20 bp, Artificial Sequence
  EML4 Reverse Primer
ggtgaaggacacagaaggga

SEQ ID NO: 25964 - DNA, 20 bp, Artificial Sequence
  EML4 Reverse Primer
tgtgtctggggaaatgaaca

SEQ ID NO: 25965 - DNA, 21 bp, Artificial Sequence
  EML4 Reverse Primer
tcatgaggcaggtagttttcc

SEQ ID NO: 25966 - DNA, 20 bp, Artificial Sequence
  EML4 Reverse Primer
gtgcaggccaaaggtatgtt

SEQ ID NO: 25967 - DNA, 23 bp, Artificial Sequence
  EML4 Reverse Primer
gagtggtcataaatccctttcaa

SEQ ID NO: 25968 - DNA, 21 bp, Artificial Sequence
  EML4 Reverse Primer
gccagaaattgtttgaagtgc

SEQ ID NO: 25969 - DNA, 24 bp, Artificial Sequence
  EML4 Reverse Primer
aaaggatgagatatctgccttcag

SEQ ID NO: 25970 - DNA, 20 bp, Artificial Sequence
  EML4 Reverse Primer
catacctcacaggggctgtt

SEQ ID NO: 25971 - DNA, 20 bp, Artificial Sequence
  EML4 Reverse Primer
cattctcctgcacttcctcc

SEQ ID NO: 25972 - DNA, 20 bp, Artificial Sequence
  EML4 Reverse Primer
cccccacgatttgtaatttt

SEQ ID NO: 25973 - DNA, 20 bp, Artificial Sequence
  EML4 Reverse Primer
ccgtccaggacatgagtttt

SEQ ID NO: 25974 - DNA, 20 bp, Artificial Sequence
  EML4 Reverse Primer
actcagcgacactacctggg

SEQ ID NO: 25975 - DNA, 23 bp, Artificial Sequence
  EML4 Reverse Primer
ttgaagctttattcttttgggaa

SEQ ID NO: 25976 - DNA, 22 bp, Artificial Sequence
  EML4 Reverse Primer
gctggcacctgtatctttatcc

SEQ ID NO: 25977 - DNA, 21 bp, Artificial Sequence
  EML4 Reverse Primer
gctgtaaagaatgaggaagca

SEQ ID NO: 25978 - DNA, 21 bp, Artificial Sequence
  EML4 Reverse Primer
tgtgaagatgctcattgctgt

SEQ ID NO: 25979 - DNA, 22 bp, Artificial Sequence
  EML4 Reverse Primer
tgatgattgtttgatttgctga

SEQ ID NO: 25980 - DNA, 26 bp, Artificial Sequence
  EML4 Reverse Primer
tgaggaatttctagtataagcatgga

SEQ ID NO: 25981 - DNA, 25 bp, Artificial Sequence
  EML4 Reverse Primer
cctgtagtgcataggattaaatgaa

SEQ ID NO: 25982 - DNA, 20 bp, Artificial Sequence
  EML4 Reverse Primer
ttttgcagcctctacaaccc

SEQ ID NO: 25983 - DNA, 20 bp, Artificial Sequence
  EML4 Reverse Primer
ggatgcatttttgccttacc

SEQ ID NO: 25984 - DNA, 24 bp, Artificial Sequence
  EML4 Reverse Primer
ggagataagaggtcataaaggcaa

SEQ ID NO: 25985 - DNA, 25 bp, Artificial Sequence
  EML4 Reverse Primer
attgtaaagcatatttcacaaatga

SEQ ID NO: 25986 - DNA, 25 bp, Artificial Sequence
  EML4 Reverse Primer
tcaaactgtcaaaatttagtgagga

SEQ ID NO: 25987 - DNA, 22 bp, Artificial Sequence
  EML4 Reverse Primer
tgtttcagagagcgatgagttt

SEQ ID NO: 25988 - DNA, 22 bp, Artificial Sequence
  EML4 Reverse Primer
caagcaacttgaagcaatttca

SEQ ID NO: 25989 - DNA, 20 bp, Artificial Sequence
  EML4 Reverse Primer
aatgcattgaagctgggttt

SEQ ID NO: 25990 - DNA, 21 bp, Artificial Sequence
  EML4 Reverse Primer
gggaagttgcatgaaaatgaa

SEQ ID NO: 25991 - DNA, 20 bp, Artificial Sequence
  EML4 Reverse Primer
caaccaccagtttcatccct

SEQ ID NO: 25992 - DNA, 21 bp, Artificial Sequence
  EML4 Reverse Primer
tgaaggggaagaaatagggaa

SEQ ID NO: 25993 - DNA, 20 bp, Artificial Sequence
  EML4 Reverse Primer
ctggcccaaattgttcatct

SEQ ID NO: 25994 - DNA, 20 bp, Artificial Sequence
  EML4 Reverse Primer
ctggaaaggggatctagggt

SEQ ID NO: 25995 - DNA, 20 bp, Artificial Sequence
  EML4 Reverse Primer
atgatgggtatgctgggaat

SEQ ID NO: 25996 - DNA, 23 bp, Artificial Sequence
  EML4 Reverse Primer
ggacatcaaatttaaatcatccc

SEQ ID NO: 25997 - DNA, 19 bp, Artificial Sequence
  EML4 Reverse Primer
ctggagcggcaattcacta

SEQ ID NO: 25998 - DNA, 22 bp, Artificial Sequence
  EML4 Reverse Primer
tgagcaagtcaccaacatacct

SEQ ID NO: 25999 - DNA, 20 bp, Artificial Sequence
  EML4 Reverse Primer
acaggtcctctttgcccttt

SEQ ID NO: 26000 - DNA, 20 bp, Artificial Sequence
  EML4 Reverse Primer
cagggcaacatgtcctttct

SEQ ID NO: 26001 - DNA, 20 bp, Artificial Sequence
  EML4 Reverse Primer
aagaatggcagtgggttgag

SEQ ID NO: 26002 - DNA, 20 bp, Artificial Sequence
  EML4 Reverse Primer
ggggacaggaagaagaggtt

SEQ ID NO: 26003 - DNA, 20 bp, Artificial Sequence
  EML4 Reverse Primer
ctgcacctgtggcagtctta

SEQ ID NO: 26004 - DNA, 27 bp, Artificial Sequence
  EML4 Reverse Primer
ttttctgtttcttaagtaggtatgagg

SEQ ID NO: 26005 - DNA, 20 bp, Artificial Sequence
  EML4 Reverse Primer
gcacagaaagccttccaaac

SEQ ID NO: 26006 - DNA, 21 bp, Artificial Sequence
  EML4 Reverse Primer
caggcccataagaaagacatc

SEQ ID NO: 26007 - DNA, 20 bp, Artificial Sequence
  EML4 Reverse Primer
ttttccatcattctgggagg

SEQ ID NO: 26008 - DNA, 20 bp, Artificial Sequence
  EML4 Reverse Primer
gtgtcctccctctcgtggta

SEQ ID NO: 26009 - DNA, 23 bp, Artificial Sequence
  EML4 Reverse Primer
ttcatcagttgaggaacagtttt

SEQ ID NO: 26010 - DNA, 20 bp, Artificial Sequence
  EML4 Reverse Primer
ccttaaaagggggcaaaata

SEQ ID NO: 26011 - DNA, 20 bp, Artificial Sequence
  EML4 Reverse Primer
tagtgcccccatatctcagc

SEQ ID NO: 26012 - DNA, 20 bp, Artificial Sequence
  EML4 Reverse Primer
gctttgcacaaaagacttgc

SEQ ID NO: 26013 - DNA, 20 bp, Artificial Sequence
  EML4 Reverse Primer
tggaggagggaaagacagaa

SEQ ID NO: 26014 - DNA, 22 bp, Artificial Sequence
  EML4 Reverse Primer
aaaccagagcaaatgtcacaaa

SEQ ID NO: 26015 - DNA, 21 bp, Artificial Sequence
  EML4 Reverse Primer
cactccttcctttcccatttc

SEQ ID NO: 26016 - DNA, 20 bp, Artificial Sequence
  EML4 Reverse Primer
gctgtagcagaaggaaaggc

SEQ ID NO: 26017 - DNA, 20 bp, Artificial Sequence
  EML4 Reverse Primer
tgtgcctgtggaactcaatg

SEQ ID NO: 26018 - DNA, 20 bp, Artificial Sequence
  EML4 Reverse Primer
gcattgcagttggattcagt

SEQ ID NO: 26019 - DNA, 20 bp, Artificial Sequence
  EML4 Reverse Primer
cagcatatccccttcatgct

SEQ ID NO: 26020 - DNA, 20 bp, Artificial Sequence
  EML4 Reverse Primer
ataggaacgcactcaggcag

SEQ ID NO: 26021 - DNA, 20 bp, Artificial Sequence
  EML4 Reverse Primer
ggagtgcagttgcaaaatga

SEQ ID NO: 26022 - DNA, 21 bp, Artificial Sequence
  EML4 Reverse Primer
agacctgtcttgcagaccttg

SEQ ID NO: 26023 - DNA, 20 bp, Artificial Sequence
  EML4 Reverse Primer
tagcgatttttccttctggc

SEQ ID NO: 26024 - DNA, 20 bp, Artificial Sequence
  EML4 Reverse Primer
ggctagctcagatcttcccc

SEQ ID NO: 26025 - DNA, 20 bp, Artificial Sequence
  EML4 Reverse Primer
gagctcaggttctgcatggt

SEQ ID NO: 26026 - DNA, 20 bp, Artificial Sequence
  EML4 Reverse Primer
gccccaatttgtagggaaaa

SEQ ID NO: 26027 - DNA, 23 bp, Artificial Sequence
  EML4 Reverse Primer
gggattgattagaatctagggga

SEQ ID NO: 26028 - DNA, 18 bp, Artificial Sequence
  EML4 Reverse Primer
ccatcatggtggctcagg

SEQ ID NO: 26029 - DNA, 20 bp, Artificial Sequence
  EML4 Reverse Primer
acttaggcacggttttggtg

SEQ ID NO: 26030 - DNA, 20 bp, Artificial Sequence
  EML4 Reverse Primer
tcccatccattttcttcctg

SEQ ID NO: 26031 - DNA, 20 bp, Artificial Sequence
  EML4 Reverse Primer
tatccctggtcttaccacgc

SEQ ID NO: 26032 - DNA, 20 bp, Artificial Sequence
  EML4 Reverse Primer
ggcttgctactgttccctca

SEQ ID NO: 26033 - DNA, 23 bp, Artificial Sequence
  EML4 Reverse Primer
tcccaacttagtgtcttcttcaa

SEQ ID NO: 26034 - DNA, 20 bp, Artificial Sequence
  EML4 Reverse Primer
ctggatgcagaaaccagaga

SEQ ID NO: 26035 - DNA, 21 bp, Artificial Sequence
  EML4 Reverse Primer
tgtcacatctggttagcaagc

SEQ ID NO: 26036 - DNA, 20 bp, Artificial Sequence
  EML4 Reverse Primer
cacaccactcttccctggag

SEQ ID NO: 26037 - DNA, 20 bp, Artificial Sequence
  EML4 Reverse Primer
gggaaggacaccacaaaaga

SEQ ID NO: 26038 - DNA, 20 bp, Artificial Sequence
  EML4 Reverse Primer
ggtaccttcctggctgtagg

SEQ ID NO: 26039 - DNA, 20 bp, Artificial Sequence
  EML4 Reverse Primer
catcagagttccctgtgtgc

SEQ ID NO: 26040 - DNA, 21 bp, Artificial Sequence
  EML4 Reverse Primer
tcacttctctgccactgaaaa

SEQ ID NO: 26041 - DNA, 23 bp, Artificial Sequence
  EML4 Reverse Primer
ccacaaaacagttcattttaggg

SEQ ID NO: 26042 - DNA, 26 bp, Artificial Sequence
  EML4 Reverse Primer
caacttcagagtttagaatttgtcca

SEQ ID NO: 26043 - DNA, 20 bp, Artificial Sequence
  EML4 Reverse Primer
ccctgtagcacttagcccac

SEQ ID NO: 26044 - DNA, 21 bp, Artificial Sequence
  EML4 Reverse Primer
gcaagtttgtcaaatgcatga

SEQ ID NO: 26045 - DNA, 20 bp, Artificial Sequence
  EML4 Reverse Primer
taggacaggcaaaactgggt

SEQ ID NO: 26046 - DNA, 20 bp, Artificial Sequence
  EML4 Reverse Primer
ctgcagaagcacagtacgct

SEQ ID NO: 26047 - DNA, 20 bp, Artificial Sequence
  EML4 Reverse Primer
gagcctgggttgtacctacg

SEQ ID NO: 26048 - DNA, 20 bp, Artificial Sequence
  EML4 Reverse Primer
tcgaagatcttagcccagga

SEQ ID NO: 26049 - DNA, 20 bp, Artificial Sequence
  EML4 Reverse Primer
aactccagccatcatcacct

SEQ ID NO: 26050 - DNA, 25 bp, Artificial Sequence
  EML4 Reverse Primer
gagaataaacatagcaacaaaagca

SEQ ID NO: 26051 - DNA, 20 bp, Artificial Sequence
  EML4 Reverse Primer
catggttgggaataagcaga

SEQ ID NO: 26052 - DNA, 20 bp, Artificial Sequence
  EML4 Reverse Primer
ctgcattggactgcactgat

SEQ ID NO: 26053 - DNA, 20 bp, Artificial Sequence
  EML4 Reverse Primer
acaataatgaaagggccagc

SEQ ID NO: 26054 - DNA, 20 bp, Artificial Sequence
  EML4 Reverse Primer
ttgatgccaggcagaaaata

SEQ ID NO: 26055 - DNA, 20 bp, Artificial Sequence
  EML4 Reverse Primer
gcctgtactttgccatgacc

SEQ ID NO: 26056 - DNA, 24 bp, Artificial Sequence
  EML4 Reverse Primer
gatttcagaaagcttcacttctca

SEQ ID NO: 26057 - DNA, 22 bp, Artificial Sequence
  EML4 Reverse Primer
tttgaccacagactgtaggagg

SEQ ID NO: 26058 - DNA, 20 bp, Artificial Sequence
  EML4 Reverse Primer
ggtgaattttccccaaaaca

SEQ ID NO: 26059 - DNA, 20 bp, Artificial Sequence
  EML4 Reverse Primer
gtgctgaggatttgctgtga

SEQ ID NO: 26060 - DNA, 20 bp, Artificial Sequence
  EML4 Reverse Primer
cagagaatgcttgccaacct

SEQ ID NO: 26061 - DNA, 21 bp, Artificial Sequence
  EML4 Reverse Primer
cttccatgggaaacagtttgt

SEQ ID NO: 26062 - DNA, 20 bp, Artificial Sequence
  EML4 Reverse Primer
aaggacattgattggacgac

SEQ ID NO: 26063 - DNA, 20 bp, Artificial Sequence
  EML4 Reverse Primer
tggggcttcttcctaatctg

SEQ ID NO: 26064 - DNA, 20 bp, Artificial Sequence
  EML4 Reverse Primer
tgaaaattgggttctccagc

SEQ ID NO: 26065 - DNA, 20 bp, Artificial Sequence
  EML4 Reverse Primer
aagtggccaacatctcaacc

SEQ ID NO: 26066 - DNA, 21 bp, Artificial Sequence
  EML4 Reverse Primer
ctccacttcgaagacttggtg

SEQ ID NO: 26067 - DNA, 20 bp, Artificial Sequence
  EML4 Reverse Primer
tgcatccctgtgtttccata

SEQ ID NO: 26068 - DNA, 20 bp, Artificial Sequence
  EML4 Reverse Primer
atccaggcagtgcttgtctt

SEQ ID NO: 26069 - DNA, 22 bp, Artificial Sequence
  EML4 Reverse Primer
aagctctggcaagtatacgacc

SEQ ID NO: 26070 - DNA, 20 bp, Artificial Sequence
  EML4 Reverse Primer
agccatgtcaccaatgtcag

SEQ ID NO: 26071 - DNA, 20 bp, Artificial Sequence
  EML4 Reverse Primer
aggaggagagtgaagagggc

SEQ ID NO: 26072 - DNA, 22 bp, Artificial Sequence
  EML4 Reverse Primer
ttgagattttggtttccatgtg

SEQ ID NO: 26073 - DNA, 21 bp, Artificial Sequence
  EML4 Reverse Primer
ttcttcaggaacaaccagagg

SEQ ID NO: 26074 - DNA, 22 bp, Artificial Sequence
  EML4 Reverse Primer
ggtgctgccttttctaagtcat

SEQ ID NO: 26075 - DNA, 21 bp, Artificial Sequence
  EML4 Reverse Primer
tggctaatttcagctaagcct

SEQ ID NO: 26076 - DNA, 21 bp, Artificial Sequence
  EML4 Reverse Primer
ggctatcctactcttttgggc

SEQ ID NO: 26077 - DNA, 20 bp, Artificial Sequence
  EML4 Reverse Primer
caggcgtttacgtgattgtg

SEQ ID NO: 26078 - DNA, 20 bp, Artificial Sequence
  EML4 Reverse Primer
ttccaagcaacccatctttc

SEQ ID NO: 26079 - DNA, 20 bp, Artificial Sequence
  EML4 Reverse Primer
acctttggggttgccatgta

SEQ ID NO: 26080 - DNA, 20 bp, Artificial Sequence
  EML4 Reverse Primer
ttgagccattgctatcatgc

SEQ ID NO: 26081 - DNA, 20 bp, Artificial Sequence
  Chr1p_1  Forward Primer
ctcccccatgtctgtgtctt

SEQ ID NO: 26082 - DNA, 20 bp, Artificial Sequence
  Chr1p_1  Forward Primer
gtccccaggaaatgctctct

SEQ ID NO: 26083 - DNA, 20 bp, Artificial Sequence
  Chr1p_1  Forward Primer
tctgcagtcgcttgtcctta

SEQ ID NO: 26084 - DNA, 20 bp, Artificial Sequence
  Chr1p_1  Forward Primer
catggagtggaaagggagtg

SEQ ID NO: 26085 - DNA, 20 bp, Artificial Sequence
  Chr1p_1  Forward Primer
ttcctgtttctagatggccg

SEQ ID NO: 26086 - DNA, 18 bp, Artificial Sequence
  Chr1p_1  Forward Primer
cacccagaccctgctgag

SEQ ID NO: 26087 - DNA, 20 bp, Artificial Sequence
  Chr1p_1  Forward Primer
ctggggaaaggtgtcctaca

SEQ ID NO: 26088 - DNA, 20 bp, Artificial Sequence
  Chr1p_1  Forward Primer
gtagcctagggcagagaggg

SEQ ID NO: 26089 - DNA, 20 bp, Artificial Sequence
  Chr1p_1  Forward Primer
gtaagtgcttagcaaggccg

SEQ ID NO: 26090 - DNA, 20 bp, Artificial Sequence
  Chr1p_1  Forward Primer
gcctgctgagcctgaatatc

SEQ ID NO: 26091 - DNA, 19 bp, Artificial Sequence
  Chr1p_1  Forward Primer
ctgtccagggccaggtagt

SEQ ID NO: 26092 - DNA, 20 bp, Artificial Sequence
  Chr1p_1  Forward Primer
ccctcgttccccatagattt

SEQ ID NO: 26093 - DNA, 20 bp, Artificial Sequence
  Chr1p_1  Forward Primer
ggcctttactgtggtttcca

SEQ ID NO: 26094 - DNA, 20 bp, Artificial Sequence
  Chr1p_1  Forward Primer
ctaggaatcggttggcctct

SEQ ID NO: 26095 - DNA, 20 bp, Artificial Sequence
  Chr1p_1  Forward Primer
gaggaaaatgccaggtctca

SEQ ID NO: 26096 - DNA, 20 bp, Artificial Sequence
  Chr1p_1  Forward Primer
acgcaggtcagaggtcactc

SEQ ID NO: 26097 - DNA, 20 bp, Artificial Sequence
  Chr1p_1  Forward Primer
ctggagacatgaggaggcag

SEQ ID NO: 26098 - DNA, 20 bp, Artificial Sequence
  Chr1p_1  Forward Primer
cgagtcagcattttgggtct

SEQ ID NO: 26099 - DNA, 20 bp, Artificial Sequence
  Chr1p_1  Forward Primer
tgttgggagtttcactgtgg

SEQ ID NO: 26100 - DNA, 20 bp, Artificial Sequence
  Chr1p_1  Forward Primer
agtgttgggttggagtctgg

SEQ ID NO: 26101 - DNA, 18 bp, Artificial Sequence
  Chr1p_1  Forward Primer
cagtcaggcttgtgggga

SEQ ID NO: 26102 - DNA, 20 bp, Artificial Sequence
  Chr1p_1  Forward Primer
gtgagtgggagagagacgga

SEQ ID NO: 26103 - DNA, 20 bp, Artificial Sequence
  Chr1p_1  Forward Primer
gtgagtcagagctgggatgg

SEQ ID NO: 26104 - DNA, 20 bp, Artificial Sequence
  Chr1p_1  Forward Primer
tcagatctgtcagcccagtg

SEQ ID NO: 26105 - DNA, 20 bp, Artificial Sequence
  Chr1p_1  Forward Primer
tctgctgaggatcccaaaat

SEQ ID NO: 26106 - DNA, 20 bp, Artificial Sequence
  Chr1p_1  Forward Primer
ctcagcaggtctggtctcct

SEQ ID NO: 26107 - DNA, 20 bp, Artificial Sequence
  Chr1p_1  Forward Primer
tcatacaggagacgctgtgg

SEQ ID NO: 26108 - DNA, 20 bp, Artificial Sequence
  Chr1p_1  Forward Primer
agggggtttgagtgtgtctg

SEQ ID NO: 26109 - DNA, 20 bp, Artificial Sequence
  Chr1p_1  Forward Primer
gagagaacaggtgtccctgg

SEQ ID NO: 26110 - DNA, 20 bp, Artificial Sequence
  Chr1p_1  Forward Primer
tccagtttcctcttcccaga

SEQ ID NO: 26111 - DNA, 20 bp, Artificial Sequence
  Chr1p_1  Forward Primer
tcgaagggatcgctctactg

SEQ ID NO: 26112 - DNA, 20 bp, Artificial Sequence
  Chr1p_1  Forward Primer
tttatcacatggccgactcc

SEQ ID NO: 26113 - DNA, 18 bp, Artificial Sequence
  Chr1p_1  Forward Primer
ccctgcccttgtgtcaaa

SEQ ID NO: 26114 - DNA, 20 bp, Artificial Sequence
  Chr1p_1  Forward Primer
aatttcccagaatcgcacag

SEQ ID NO: 26115 - DNA, 20 bp, Artificial Sequence
  Chr1p_1  Forward Primer
ttggtgttttctttggcctc

SEQ ID NO: 26116 - DNA, 20 bp, Artificial Sequence
  Chr1p_1  Forward Primer
actcctcactgactgggacc

SEQ ID NO: 26117 - DNA, 20 bp, Artificial Sequence
  Chr1p_1  Forward Primer
gtgtccacctggaaaccatc

SEQ ID NO: 26118 - DNA, 20 bp, Artificial Sequence
  Chr1p_1  Forward Primer
tatatcgctgggtccaggtc

SEQ ID NO: 26119 - DNA, 18 bp, Artificial Sequence
  Chr1p_1  Forward Primer
ccagacactgggtgggtt

SEQ ID NO: 26120 - DNA, 20 bp, Artificial Sequence
  Chr1p_1  Forward Primer
tgaccccgcatactcttctc

SEQ ID NO: 26121 - DNA, 20 bp, Artificial Sequence
  Chr1p_1  Forward Primer
tcgactccgaataggacacc

SEQ ID NO: 26122 - DNA, 20 bp, Artificial Sequence
  Chr1p_1  Forward Primer
tgttcaagatggacttggca

SEQ ID NO: 26123 - DNA, 20 bp, Artificial Sequence
  Chr1p_1  Forward Primer
gtgaggaaggaacgatggtg

SEQ ID NO: 26124 - DNA, 20 bp, Artificial Sequence
  Chr1p_1  Forward Primer
ggacacctgtcctccttcac

SEQ ID NO: 26125 - DNA, 20 bp, Artificial Sequence
  Chr1p_1  Forward Primer
tatcgttagcgtttcccctg

SEQ ID NO: 26126 - DNA, 22 bp, Artificial Sequence
  Chr1p_1  Forward Primer
cccaccacattcatgaaaatta

SEQ ID NO: 26127 - DNA, 20 bp, Artificial Sequence
  Chr1p_1  Forward Primer
gcatctggttgagcagaaca

SEQ ID NO: 26128 - DNA, 20 bp, Artificial Sequence
  Chr1p_1  Forward Primer
cgcatattggctgttaggaa

SEQ ID NO: 26129 - DNA, 20 bp, Artificial Sequence
  Chr1p_1  Forward Primer
ccatatggcagaacacatgc

SEQ ID NO: 26130 - DNA, 20 bp, Artificial Sequence
  Chr1p_1  Forward Primer
agcaacttttccgagacacg

SEQ ID NO: 26131 - DNA, 20 bp, Artificial Sequence
  Chr1p_1  Forward Primer
gttttgtgtgttgctcgcat

SEQ ID NO: 26132 - DNA, 20 bp, Artificial Sequence
  Chr1p_1  Forward Primer
gcaggctcttctcttctcca

SEQ ID NO: 26133 - DNA, 20 bp, Artificial Sequence
  Chr1p_1  Forward Primer
cttacctttgggtggtgagg

SEQ ID NO: 26134 - DNA, 20 bp, Artificial Sequence
  Chr1p_1  Forward Primer
gactctggaaaggagtcccc

SEQ ID NO: 26135 - DNA, 20 bp, Artificial Sequence
  Chr1p_1  Forward Primer
cagagcccatcctgaatagc

SEQ ID NO: 26136 - DNA, 19 bp, Artificial Sequence
  Chr1p_1  Forward Primer
gttcctcccctgcagtctc

SEQ ID NO: 26137 - DNA, 20 bp, Artificial Sequence
  Chr1p_1  Forward Primer
ccagcagagtcttcccgtag

SEQ ID NO: 26138 - DNA, 20 bp, Artificial Sequence
  Chr1p_1  Forward Primer
gaatccctccctgtcatcag

SEQ ID NO: 26139 - DNA, 20 bp, Artificial Sequence
  Chr1p_1  Forward Primer
gagccgtctcttcttcaccc

SEQ ID NO: 26140 - DNA, 20 bp, Artificial Sequence
  Chr1p_1  Forward Primer
ttgtagtcagctgcacccag

SEQ ID NO: 26141 - DNA, 20 bp, Artificial Sequence
  Chr1p_1  Forward Primer
acaccagtgcttctccaagg

SEQ ID NO: 26142 - DNA, 23 bp, Artificial Sequence
  Chr1p_1  Forward Primer
ttttccaaacaaatggtttatcc

SEQ ID NO: 26143 - DNA, 20 bp, Artificial Sequence
  Chr1p_1  Forward Primer
gtcctttgcccgttttgtaa

SEQ ID NO: 26144 - DNA, 20 bp, Artificial Sequence
  Chr1p_1  Forward Primer
ggtggacgaatctgtccttg

SEQ ID NO: 26145 - DNA, 20 bp, Artificial Sequence
  Chr1p_1  Forward Primer
ctctgtgtgaagaggagggc

SEQ ID NO: 26146 - DNA, 20 bp, Artificial Sequence
  Chr1p_1  Forward Primer
gctccgtgggtttgtttaag

SEQ ID NO: 26147 - DNA, 20 bp, Artificial Sequence
  Chr1p_1  Forward Primer
cttgccttcagcatagaggg

SEQ ID NO: 26148 - DNA, 20 bp, Artificial Sequence
  Chr1p_1  Forward Primer
ctgaaaagcacctcctcctg

SEQ ID NO: 26149 - DNA, 20 bp, Artificial Sequence
  Chr1p_1  Forward Primer
ggaaaaggtcctggtgacag

SEQ ID NO: 26150 - DNA, 20 bp, Artificial Sequence
  Chr1p_1  Forward Primer
ctgacacgtgtgtctgctcc

SEQ ID NO: 26151 - DNA, 20 bp, Artificial Sequence
  Chr1p_1  Forward Primer
taccgtctggcttctctgct

SEQ ID NO: 26152 - DNA, 20 bp, Artificial Sequence
  Chr1p_1  Forward Primer
cagacccttctaggtctgcg

SEQ ID NO: 26153 - DNA, 20 bp, Artificial Sequence
  Chr1p_1  Forward Primer
tctgcggagtaaatgggtgt

SEQ ID NO: 26154 - DNA, 20 bp, Artificial Sequence
  Chr1p_1  Forward Primer
atgatcggtccctgagtgtc

SEQ ID NO: 26155 - DNA, 20 bp, Artificial Sequence
  Chr1p_1  Forward Primer
ttggcctagttctgacaggg

SEQ ID NO: 26156 - DNA, 20 bp, Artificial Sequence
  Chr1p_1  Forward Primer
cagtccctgttgagcaaggt

SEQ ID NO: 26157 - DNA, 20 bp, Artificial Sequence
  Chr1p_1  Forward Primer
tcgtcgtcatattccgagtg

SEQ ID NO: 26158 - DNA, 20 bp, Artificial Sequence
  Chr1p_1  Forward Primer
aaaccacttctcctggagcc

SEQ ID NO: 26159 - DNA, 20 bp, Artificial Sequence
  Chr1p_1  Forward Primer
gaattttcagtgcgatgcag

SEQ ID NO: 26160 - DNA, 20 bp, Artificial Sequence
  Chr1p_1  Forward Primer
ccagatgaggctcacaggac

SEQ ID NO: 26161 - DNA, 20 bp, Artificial Sequence
  Chr1p_1  Forward Primer
gtgacctatttcccgttcca

SEQ ID NO: 26162 - DNA, 20 bp, Artificial Sequence
  Chr1p_1  Forward Primer
cggaagccatttctcatctt

SEQ ID NO: 26163 - DNA, 20 bp, Artificial Sequence
  Chr1p_1  Forward Primer
atctgccttgtggaaaaacg

SEQ ID NO: 26164 - DNA, 19 bp, Artificial Sequence
  Chr1p_1  Forward Primer
ttgcacagaaagtggagcc

SEQ ID NO: 26165 - DNA, 20 bp, Artificial Sequence
  Chr1p_1  Forward Primer
cctatatgatgtggtccccg

SEQ ID NO: 26166 - DNA, 20 bp, Artificial Sequence
  Chr1p_1  Forward Primer
cccttctctggtggtctcac

SEQ ID NO: 26167 - DNA, 20 bp, Artificial Sequence
  Chr1p_1  Forward Primer
cttcctggagaatgagggtg

SEQ ID NO: 26168 - DNA, 20 bp, Artificial Sequence
  Chr1p_1  Forward Primer
aatttccatcccctgtctcc

SEQ ID NO: 26169 - DNA, 20 bp, Artificial Sequence
  Chr1p_1  Forward Primer
cacagctgccgcagtagtaa

SEQ ID NO: 26170 - DNA, 19 bp, Artificial Sequence
  Chr1p_1  Forward Primer
gtagatgggaaggaagggc

SEQ ID NO: 26171 - DNA, 20 bp, Artificial Sequence
  Chr1p_1  Forward Primer
ttccaggatggtccagaaag

SEQ ID NO: 26172 - DNA, 20 bp, Artificial Sequence
  Chr1p_1  Forward Primer
gtctgcgaggggtatgtgtt

SEQ ID NO: 26173 - DNA, 20 bp, Artificial Sequence
  Chr1p_1  Forward Primer
gagcacgaaagggagagttg

SEQ ID NO: 26174 - DNA, 20 bp, Artificial Sequence
  Chr1p_1  Forward Primer
catgaagcaatttcccatcc

SEQ ID NO: 26175 - DNA, 20 bp, Artificial Sequence
  Chr1p_1  Forward Primer
acagagctgtcaggaggagc

SEQ ID NO: 26176 - DNA, 20 bp, Artificial Sequence
  Chr1p_1  Forward Primer
gtcctcaggattgttgggag

SEQ ID NO: 26177 - DNA, 20 bp, Artificial Sequence
  Chr1p_1  Reverse Primer
gtcaactgtggtgcgttgag

SEQ ID NO: 26178 - DNA, 20 bp, Artificial Sequence
  Chr1p_1  Reverse Primer
tcttagaggggtccgaaagg

SEQ ID NO: 26179 - DNA, 19 bp, Artificial Sequence
  Chr1p_1  Reverse Primer
ccatcacctcctggaccac

SEQ ID NO: 26180 - DNA, 20 bp, Artificial Sequence
  Chr1p_1  Reverse Primer
ccacgtccacctactgtcct

SEQ ID NO: 26181 - DNA, 20 bp, Artificial Sequence
  Chr1p_1  Reverse Primer
tttaccacacaccacaggga

SEQ ID NO: 26182 - DNA, 20 bp, Artificial Sequence
  Chr1p_1  Reverse Primer
gtatgccatctgtgctgtgg

SEQ ID NO: 26183 - DNA, 20 bp, Artificial Sequence
  Chr1p_1  Reverse Primer
ggcagtagtcacggtgtcct

SEQ ID NO: 26184 - DNA, 20 bp, Artificial Sequence
  Chr1p_1  Reverse Primer
cacatgcctgaagtcacagc

SEQ ID NO: 26185 - DNA, 20 bp, Artificial Sequence
  Chr1p_1  Reverse Primer
atccgttgataggcttccgt

SEQ ID NO: 26186 - DNA, 20 bp, Artificial Sequence
  Chr1p_1  Reverse Primer
acccctggctaggcctataa

SEQ ID NO: 26187 - DNA, 20 bp, Artificial Sequence
  Chr1p_1  Reverse Primer
gcctagtgctccaaatcagc

SEQ ID NO: 26188 - DNA, 20 bp, Artificial Sequence
  Chr1p_1  Reverse Primer
tatctgcattcacggagtgg

SEQ ID NO: 26189 - DNA, 20 bp, Artificial Sequence
  Chr1p_1  Reverse Primer
ccacagcgaacctttcaaat

SEQ ID NO: 26190 - DNA, 18 bp, Artificial Sequence
  Chr1p_1  Reverse Primer
cacttccccaaacgcact

SEQ ID NO: 26191 - DNA, 20 bp, Artificial Sequence
  Chr1p_1  Reverse Primer
cagcctaaggcaggagacac

SEQ ID NO: 26192 - DNA, 20 bp, Artificial Sequence
  Chr1p_1  Reverse Primer
gctgacgtcacaggaaaaca

SEQ ID NO: 26193 - DNA, 20 bp, Artificial Sequence
  Chr1p_1  Reverse Primer
ctcctcagcgcagattcttt

SEQ ID NO: 26194 - DNA, 20 bp, Artificial Sequence
  Chr1p_1  Reverse Primer
aggtccctccacagccttat

SEQ ID NO: 26195 - DNA, 19 bp, Artificial Sequence
  Chr1p_1  Reverse Primer
aggctcgagacggaaagac

SEQ ID NO: 26196 - DNA, 20 bp, Artificial Sequence
  Chr1p_1  Reverse Primer
atggtcgtcagaaaagcacc

SEQ ID NO: 26197 - DNA, 20 bp, Artificial Sequence
  Chr1p_1  Reverse Primer
ttcatcactcaaggacccct

SEQ ID NO: 26198 - DNA, 20 bp, Artificial Sequence
  Chr1p_1  Reverse Primer
agtaaccgctcgaatcctga

SEQ ID NO: 26199 - DNA, 20 bp, Artificial Sequence
  Chr1p_1  Reverse Primer
accaccagtggctctgaagt

SEQ ID NO: 26200 - DNA, 20 bp, Artificial Sequence
  Chr1p_1  Reverse Primer
gatcagaaacgtgtggcaga

SEQ ID NO: 26201 - DNA, 20 bp, Artificial Sequence
  Chr1p_1  Reverse Primer
gacctgctcctggtttttca

SEQ ID NO: 26202 - DNA, 21 bp, Artificial Sequence
  Chr1p_1  Reverse Primer
ttctgccctttgcataaaatg

SEQ ID NO: 26203 - DNA, 20 bp, Artificial Sequence
  Chr1p_1  Reverse Primer
tctcagggggaacaacagac

SEQ ID NO: 26204 - DNA, 20 bp, Artificial Sequence
  Chr1p_1  Reverse Primer
caacaatcaaggttcgctga

SEQ ID NO: 26205 - DNA, 20 bp, Artificial Sequence
  Chr1p_1  Reverse Primer
caggaggatggaacaaggaa

SEQ ID NO: 26206 - DNA, 20 bp, Artificial Sequence
  Chr1p_1  Reverse Primer
acagctgctggagggtctta

SEQ ID NO: 26207 - DNA, 20 bp, Artificial Sequence
  Chr1p_1  Reverse Primer
atccaaatgtcgcaaggttc

SEQ ID NO: 26208 - DNA, 20 bp, Artificial Sequence
  Chr1p_1  Reverse Primer
cgaaagacaagaacgggaac

SEQ ID NO: 26209 - DNA, 22 bp, Artificial Sequence
  Chr1p_1  Reverse Primer
gcctcagtgctaatctttaccc

SEQ ID NO: 26210 - DNA, 20 bp, Artificial Sequence
  Chr1p_1  Reverse Primer
agccaagccttttaccatca

SEQ ID NO: 26211 - DNA, 20 bp, Artificial Sequence
  Chr1p_1  Reverse Primer
ggggcagcagactccttact

SEQ ID NO: 26212 - DNA, 20 bp, Artificial Sequence
  Chr1p_1  Reverse Primer
tcccaagaccaaaggaagaa

SEQ ID NO: 26213 - DNA, 20 bp, Artificial Sequence
  Chr1p_1  Reverse Primer
tttgccctccttaaaaccct

SEQ ID NO: 26214 - DNA, 20 bp, Artificial Sequence
  Chr1p_1  Reverse Primer
agtcccgtgcaaaacttgac

SEQ ID NO: 26215 - DNA, 20 bp, Artificial Sequence
  Chr1p_1  Reverse Primer
tgcagtaccaatcacctccc

SEQ ID NO: 26216 - DNA, 21 bp, Artificial Sequence
  Chr1p_1  Reverse Primer
aactgaggaagtcagtgcagc

SEQ ID NO: 26217 - DNA, 20 bp, Artificial Sequence
  Chr1p_1  Reverse Primer
cctccctcttgccaaataca

SEQ ID NO: 26218 - DNA, 20 bp, Artificial Sequence
  Chr1p_1  Reverse Primer
cactgcccacatcacaaaac

SEQ ID NO: 26219 - DNA, 20 bp, Artificial Sequence
  Chr1p_1  Reverse Primer
aatggaaccaggtctcctga

SEQ ID NO: 26220 - DNA, 20 bp, Artificial Sequence
  Chr1p_1  Reverse Primer
gtggacacctgtccttcacc

SEQ ID NO: 26221 - DNA, 20 bp, Artificial Sequence
  Chr1p_1  Reverse Primer
cggagctggaatcagagact

SEQ ID NO: 26222 - DNA, 20 bp, Artificial Sequence
  Chr1p_1  Reverse Primer
gccgaatattttgtttggga

SEQ ID NO: 26223 - DNA, 20 bp, Artificial Sequence
  Chr1p_1  Reverse Primer
cccacgtttaccagaggaaa

SEQ ID NO: 26224 - DNA, 18 bp, Artificial Sequence
  Chr1p_1  Reverse Primer
ctgaggccagggaggtct

SEQ ID NO: 26225 - DNA, 19 bp, Artificial Sequence
  Chr1p_1  Reverse Primer
aaggtgctgccacacagac

SEQ ID NO: 26226 - DNA, 20 bp, Artificial Sequence
  Chr1p_1  Reverse Primer
cgccaggagtaaagtcaagc

SEQ ID NO: 26227 - DNA, 19 bp, Artificial Sequence
  Chr1p_1  Reverse Primer
aactgcacatcgaatcccc

SEQ ID NO: 26228 - DNA, 20 bp, Artificial Sequence
  Chr1p_1  Reverse Primer
ctggaaactgctctccaagg

SEQ ID NO: 26229 - DNA, 20 bp, Artificial Sequence
  Chr1p_1  Reverse Primer
ccaggtgatgggatacaacc

SEQ ID NO: 26230 - DNA, 20 bp, Artificial Sequence
  Chr1p_1  Reverse Primer
ccgtcttcactgagtgtcca

SEQ ID NO: 26231 - DNA, 20 bp, Artificial Sequence
  Chr1p_1  Reverse Primer
gcagagctgtgcctcttctc

SEQ ID NO: 26232 - DNA, 20 bp, Artificial Sequence
  Chr1p_1  Reverse Primer
ggatggagaggctgagtcac

SEQ ID NO: 26233 - DNA, 20 bp, Artificial Sequence
  Chr1p_1  Reverse Primer
atggggtcttgctatgttgc

SEQ ID NO: 26234 - DNA, 20 bp, Artificial Sequence
  Chr1p_1  Reverse Primer
acctctgggtccttcctcat

SEQ ID NO: 26235 - DNA, 20 bp, Artificial Sequence
  Chr1p_1  Reverse Primer
gagtgcaactgaatcccctc

SEQ ID NO: 26236 - DNA, 18 bp, Artificial Sequence
  Chr1p_1  Reverse Primer
gagcagctgagggtgagg

SEQ ID NO: 26237 - DNA, 20 bp, Artificial Sequence
  Chr1p_1  Reverse Primer
aaaccaaaaacccacaacca

SEQ ID NO: 26238 - DNA, 23 bp, Artificial Sequence
  Chr1p_1  Reverse Primer
aacaaacaagaactacagtgggc

SEQ ID NO: 26239 - DNA, 20 bp, Artificial Sequence
  Chr1p_1  Reverse Primer
aaacaattgcccacaactcc

SEQ ID NO: 26240 - DNA, 20 bp, Artificial Sequence
  Chr1p_1  Reverse Primer
tctcatcaaggattcgcctc

SEQ ID NO: 26241 - DNA, 20 bp, Artificial Sequence
  Chr1p_1  Reverse Primer
caggttgctctgaaaaaggg

SEQ ID NO: 26242 - DNA, 20 bp, Artificial Sequence
  Chr1p_1  Reverse Primer
cctgctcacagtgaagacca

SEQ ID NO: 26243 - DNA, 20 bp, Artificial Sequence
  Chr1p_1  Reverse Primer
tgcagctctgtcctcacaag

SEQ ID NO: 26244 - DNA, 20 bp, Artificial Sequence
  Chr1p_1  Reverse Primer
gtcaggcagaaaaaggcaag

SEQ ID NO: 26245 - DNA, 20 bp, Artificial Sequence
  Chr1p_1  Reverse Primer
cacagcacgtcctctgtgag

SEQ ID NO: 26246 - DNA, 20 bp, Artificial Sequence
  Chr1p_1  Reverse Primer
cgtccaagacaggtggaagt

SEQ ID NO: 26247 - DNA, 20 bp, Artificial Sequence
  Chr1p_1  Reverse Primer
agtgtctgcatcacccacag

SEQ ID NO: 26248 - DNA, 20 bp, Artificial Sequence
  Chr1p_1  Reverse Primer
caccaatgctcagctctcac

SEQ ID NO: 26249 - DNA, 20 bp, Artificial Sequence
  Chr1p_1  Reverse Primer
agtcacaaggaagccaccac

SEQ ID NO: 26250 - DNA, 20 bp, Artificial Sequence
  Chr1p_1  Reverse Primer
tcctcacgaagtccgtacaa

SEQ ID NO: 26251 - DNA, 20 bp, Artificial Sequence
  Chr1p_1  Reverse Primer
tgacctcggctagaggaaaa

SEQ ID NO: 26252 - DNA, 20 bp, Artificial Sequence
  Chr1p_1  Reverse Primer
gtcagccctggtcctaatga

SEQ ID NO: 26253 - DNA, 20 bp, Artificial Sequence
  Chr1p_1  Reverse Primer
aaggaatgccttcaggttga

SEQ ID NO: 26254 - DNA, 18 bp, Artificial Sequence
  Chr1p_1  Reverse Primer
caagtcctgggccactgt

SEQ ID NO: 26255 - DNA, 20 bp, Artificial Sequence
  Chr1p_1  Reverse Primer
tcacaccctggaactgtcaa

SEQ ID NO: 26256 - DNA, 21 bp, Artificial Sequence
  Chr1p_1  Reverse Primer
gaaatgtgcaactaacatggc

SEQ ID NO: 26257 - DNA, 20 bp, Artificial Sequence
  Chr1p_1  Reverse Primer
gttcaaagcagggacctcag

SEQ ID NO: 26258 - DNA, 22 bp, Artificial Sequence
  Chr1p_1  Reverse Primer
gcaaaacaacctctaccactgc

SEQ ID NO: 26259 - DNA, 20 bp, Artificial Sequence
  Chr1p_1  Reverse Primer
ggaccttgggaacaaaacct

SEQ ID NO: 26260 - DNA, 20 bp, Artificial Sequence
  Chr1p_1  Reverse Primer
taagtctcctccaacccacg

SEQ ID NO: 26261 - DNA, 20 bp, Artificial Sequence
  Chr1p_1  Reverse Primer
agagggaaaacaagatgggg

SEQ ID NO: 26262 - DNA, 20 bp, Artificial Sequence
  Chr1p_1  Reverse Primer
cagactggctgatggtctcc

SEQ ID NO: 26263 - DNA, 20 bp, Artificial Sequence
  Chr1p_1  Reverse Primer
tccttgcgtgtctactgtgc

SEQ ID NO: 26264 - DNA, 20 bp, Artificial Sequence
  Chr1p_1  Reverse Primer
attacccacccatccatcct

SEQ ID NO: 26265 - DNA, 20 bp, Artificial Sequence
  Chr1p_1  Reverse Primer
catgactgatggagcttgga

SEQ ID NO: 26266 - DNA, 20 bp, Artificial Sequence
  Chr1p_1  Reverse Primer
tcccatctcttcagggtgac

SEQ ID NO: 26267 - DNA, 20 bp, Artificial Sequence
  Chr1p_1  Reverse Primer
ttgatgttcgactgctggag

SEQ ID NO: 26268 - DNA, 20 bp, Artificial Sequence
  Chr1p_1  Reverse Primer
ctccctctctcctcccagtc

SEQ ID NO: 26269 - DNA, 20 bp, Artificial Sequence
  Chr1p_1  Reverse Primer
atcaaggtcaacaagccagg

SEQ ID NO: 26270 - DNA, 20 bp, Artificial Sequence
  Chr1p_1  Reverse Primer
tcagggcctttcaagagttg

SEQ ID NO: 26271 - DNA, 19 bp, Artificial Sequence
  Chr1p_1  Reverse Primer
gtggtcccagcatgtgtgt

SEQ ID NO: 26272 - DNA, 20 bp, Artificial Sequence
  Chr1p_1  Reverse Primer
tttcaagtaccaagccgctc

SEQ ID NO: 26273 - DNA, 20 bp, Artificial Sequence
  Chr1p_2  Forward Primer
ggtaaccatgtgagcttggg

SEQ ID NO: 26274 - DNA, 19 bp, Artificial Sequence
  Chr1p_2  Forward Primer
ccatgatgcagtgggagtc

SEQ ID NO: 26275 - DNA, 19 bp, Artificial Sequence
  Chr1p_2  Forward Primer
gtctgggatgcagtcaagc

SEQ ID NO: 26276 - DNA, 20 bp, Artificial Sequence
  Chr1p_2  Forward Primer
cttctcgttcagccctgttt

SEQ ID NO: 26277 - DNA, 20 bp, Artificial Sequence
  Chr1p_2  Forward Primer
gctgaacacattggctttca

SEQ ID NO: 26278 - DNA, 20 bp, Artificial Sequence
  Chr1p_2  Forward Primer
cagggatgagtttgtttggc

SEQ ID NO: 26279 - DNA, 20 bp, Artificial Sequence
  Chr1p_2  Forward Primer
gacctctggtggcaagtctc

SEQ ID NO: 26280 - DNA, 20 bp, Artificial Sequence
  Chr1p_2  Forward Primer
acaggttggctccttgtcac

SEQ ID NO: 26281 - DNA, 20 bp, Artificial Sequence
  Chr1p_2  Forward Primer
ggtaggggcaggagagtacc

SEQ ID NO: 26282 - DNA, 20 bp, Artificial Sequence
  Chr1p_2  Forward Primer
cctggcctagcatatggtgt

SEQ ID NO: 26283 - DNA, 20 bp, Artificial Sequence
  Chr1p_2  Forward Primer
ggagtcagcagtcaaagcct

SEQ ID NO: 26284 - DNA, 20 bp, Artificial Sequence
  Chr1p_2  Forward Primer
ttggaggggttgacagtagg

SEQ ID NO: 26285 - DNA, 20 bp, Artificial Sequence
  Chr1p_2  Forward Primer
gatctccgtgatagcgggta

SEQ ID NO: 26286 - DNA, 20 bp, Artificial Sequence
  Chr1p_2  Forward Primer
tttggatggctttcctcttg

SEQ ID NO: 26287 - DNA, 20 bp, Artificial Sequence
  Chr1p_2  Forward Primer
gtcttctgcccactctttgg

SEQ ID NO: 26288 - DNA, 20 bp, Artificial Sequence
  Chr1p_2  Forward Primer
tgattctccccaaagcattc

SEQ ID NO: 26289 - DNA, 20 bp, Artificial Sequence
  Chr1p_2  Forward Primer
caggaagacaagggaactgc

SEQ ID NO: 26290 - DNA, 20 bp, Artificial Sequence
  Chr1p_2  Forward Primer
tgtttgggtgtcagtgatcc

SEQ ID NO: 26291 - DNA, 19 bp, Artificial Sequence
  Chr1p_2  Forward Primer
gaaagtggggctcaggtgt

SEQ ID NO: 26292 - DNA, 20 bp, Artificial Sequence
  Chr1p_2  Forward Primer
atgccacagaaggtgtttcc

SEQ ID NO: 26293 - DNA, 20 bp, Artificial Sequence
  Chr1p_2  Forward Primer
ggaagggaaagagctggagt

SEQ ID NO: 26294 - DNA, 20 bp, Artificial Sequence
  Chr1p_2  Forward Primer
gctttcggagtgttctcagg

SEQ ID NO: 26295 - DNA, 20 bp, Artificial Sequence
  Chr1p_2  Forward Primer
ggtcagatagtgtggccctc

SEQ ID NO: 26296 - DNA, 19 bp, Artificial Sequence
  Chr1p_2  Forward Primer
cagagccaggctgcctaat

SEQ ID NO: 26297 - DNA, 20 bp, Artificial Sequence
  Chr1p_2  Forward Primer
ttcgtttgatcctcacgatg

SEQ ID NO: 26298 - DNA, 20 bp, Artificial Sequence
  Chr1p_2  Forward Primer
gccagaggtggactcgttta

SEQ ID NO: 26299 - DNA, 20 bp, Artificial Sequence
  Chr1p_2  Forward Primer
catgccctgtgtaggaaaca

SEQ ID NO: 26300 - DNA, 20 bp, Artificial Sequence
  Chr1p_2  Forward Primer
gctggtatctgcgttgtgaa

SEQ ID NO: 26301 - DNA, 20 bp, Artificial Sequence
  Chr1p_2  Forward Primer
aaagaggagtgccaaggtga

SEQ ID NO: 26302 - DNA, 20 bp, Artificial Sequence
  Chr1p_2  Forward Primer
ggaccctgctgttcctcata

SEQ ID NO: 26303 - DNA, 20 bp, Artificial Sequence
  Chr1p_2  Forward Primer
tatccgggaaagaagctcaa

SEQ ID NO: 26304 - DNA, 20 bp, Artificial Sequence
  Chr1p_2  Forward Primer
tgtgatgtggcccaactcta

SEQ ID NO: 26305 - DNA, 20 bp, Artificial Sequence
  Chr1p_2  Forward Primer
ccaggcaatctggaaggata

SEQ ID NO: 26306 - DNA, 20 bp, Artificial Sequence
  Chr1p_2  Forward Primer
tgcagacggtaactcctcct

SEQ ID NO: 26307 - DNA, 20 bp, Artificial Sequence
  Chr1p_2  Forward Primer
tgcttctgtttggcagtttg

SEQ ID NO: 26308 - DNA, 20 bp, Artificial Sequence
  Chr1p_2  Forward Primer
ggtagaaccccaggatgtca

SEQ ID NO: 26309 - DNA, 20 bp, Artificial Sequence
  Chr1p_2  Forward Primer
cacatggagcgttgtaccag

SEQ ID NO: 26310 - DNA, 20 bp, Artificial Sequence
  Chr1p_2  Forward Primer
ttttcctctgctgccaagtt

SEQ ID NO: 26311 - DNA, 20 bp, Artificial Sequence
  Chr1p_2  Forward Primer
catctcccagtctgcagtga

SEQ ID NO: 26312 - DNA, 20 bp, Artificial Sequence
  Chr1p_2  Forward Primer
ggccaccagaccatgttaga

SEQ ID NO: 26313 - DNA, 20 bp, Artificial Sequence
  Chr1p_2  Forward Primer
cctggctttgctttctcaac

SEQ ID NO: 26314 - DNA, 20 bp, Artificial Sequence
  Chr1p_2  Forward Primer
tgacccacatcgaagactga

SEQ ID NO: 26315 - DNA, 20 bp, Artificial Sequence
  Chr1p_2  Forward Primer
agtggagaggcaggtgagaa

SEQ ID NO: 26316 - DNA, 20 bp, Artificial Sequence
  Chr1p_2  Forward Primer
aggatgtgccatctgctagg

SEQ ID NO: 26317 - DNA, 20 bp, Artificial Sequence
  Chr1p_2  Forward Primer
attcaacccctgttggtctg

SEQ ID NO: 26318 - DNA, 20 bp, Artificial Sequence
  Chr1p_2  Forward Primer
cctggccttgtgaactcatt

SEQ ID NO: 26319 - DNA, 20 bp, Artificial Sequence
  Chr1p_2  Forward Primer
aacccctccttcctgtgtct

SEQ ID NO: 26320 - DNA, 20 bp, Artificial Sequence
  Chr1p_2  Forward Primer
taaaacgggggttccctaag

SEQ ID NO: 26321 - DNA, 20 bp, Artificial Sequence
  Chr1p_2  Forward Primer
ctgccctctgtacacatccc

SEQ ID NO: 26322 - DNA, 20 bp, Artificial Sequence
  Chr1p_2  Forward Primer
catgggcattcttgttgttg

SEQ ID NO: 26323 - DNA, 20 bp, Artificial Sequence
  Chr1p_2  Forward Primer
ccctctcctttgggctctat

SEQ ID NO: 26324 - DNA, 20 bp, Artificial Sequence
  Chr1p_2  Forward Primer
cactgggtcctaagcatcgt

SEQ ID NO: 26325 - DNA, 20 bp, Artificial Sequence
  Chr1p_2  Forward Primer
agggccatctcctttttcaa

SEQ ID NO: 26326 - DNA, 20 bp, Artificial Sequence
  Chr1p_2  Forward Primer
tggcagggatatagacaggc

SEQ ID NO: 26327 - DNA, 20 bp, Artificial Sequence
  Chr1p_2  Forward Primer
atgttggggaacttgtctgg

SEQ ID NO: 26328 - DNA, 20 bp, Artificial Sequence
  Chr1p_2  Forward Primer
tgacacagctgcatgactga

SEQ ID NO: 26329 - DNA, 20 bp, Artificial Sequence
  Chr1p_2  Forward Primer
acctggaaagggtctcctgt

SEQ ID NO: 26330 - DNA, 20 bp, Artificial Sequence
  Chr1p_2  Forward Primer
tctttgcaggaataaagccg

SEQ ID NO: 26331 - DNA, 20 bp, Artificial Sequence
  Chr1p_2  Forward Primer
tcaggatctcagcattgcac

SEQ ID NO: 26332 - DNA, 20 bp, Artificial Sequence
  Chr1p_2  Forward Primer
actgggacaaggagggactt

SEQ ID NO: 26333 - DNA, 18 bp, Artificial Sequence
  Chr1p_2  Forward Primer
cacttggcctcgttctgc

SEQ ID NO: 26334 - DNA, 20 bp, Artificial Sequence
  Chr1p_2  Forward Primer
cccccttgtctttatgctga

SEQ ID NO: 26335 - DNA, 20 bp, Artificial Sequence
  Chr1p_2  Forward Primer
aagtgatggactctgccagg

SEQ ID NO: 26336 - DNA, 20 bp, Artificial Sequence
  Chr1p_2  Forward Primer
tatgttcatttgctggagcg

SEQ ID NO: 26337 - DNA, 22 bp, Artificial Sequence
  Chr1p_2  Forward Primer
tcccactataatctggctcctt

SEQ ID NO: 26338 - DNA, 20 bp, Artificial Sequence
  Chr1p_2  Forward Primer
tcatccttccagattcccag

SEQ ID NO: 26339 - DNA, 20 bp, Artificial Sequence
  Chr1p_2  Forward Primer
ttattcccagtcaaggccag

SEQ ID NO: 26340 - DNA, 20 bp, Artificial Sequence
  Chr1p_2  Forward Primer
caagtggatggtttcctgtg

SEQ ID NO: 26341 - DNA, 20 bp, Artificial Sequence
  Chr1p_2  Forward Primer
aactcagcgtatccagtccc

SEQ ID NO: 26342 - DNA, 20 bp, Artificial Sequence
  Chr1p_2  Forward Primer
ggaaaagaagggtaggctgc

SEQ ID NO: 26343 - DNA, 20 bp, Artificial Sequence
  Chr1p_2  Forward Primer
atcaaacagttggcccctct

SEQ ID NO: 26344 - DNA, 20 bp, Artificial Sequence
  Chr1p_2  Forward Primer
taaagagtgtcgaatggggg

SEQ ID NO: 26345 - DNA, 20 bp, Artificial Sequence
  Chr1p_2  Forward Primer
agaggaaggggctacctgac

SEQ ID NO: 26346 - DNA, 20 bp, Artificial Sequence
  Chr1p_2  Forward Primer
ctccagtcaagcctggaatc

SEQ ID NO: 26347 - DNA, 20 bp, Artificial Sequence
  Chr1p_2  Forward Primer
gtccaaggtaacgtgggaga

SEQ ID NO: 26348 - DNA, 20 bp, Artificial Sequence
  Chr1p_2  Forward Primer
cagggtgaccttctctgagg

SEQ ID NO: 26349 - DNA, 20 bp, Artificial Sequence
  Chr1p_2  Forward Primer
tggttctgggaaaatggaag

SEQ ID NO: 26350 - DNA, 20 bp, Artificial Sequence
  Chr1p_2  Forward Primer
attcacagatgggaaggctg

SEQ ID NO: 26351 - DNA, 20 bp, Artificial Sequence
  Chr1p_2  Forward Primer
gacttccagccacttgcttc

SEQ ID NO: 26352 - DNA, 20 bp, Artificial Sequence
  Chr1p_2  Forward Primer
gtggctgatgtggttgtgtc

SEQ ID NO: 26353 - DNA, 20 bp, Artificial Sequence
  Chr1p_2  Forward Primer
gagaggccttccctggtatg

SEQ ID NO: 26354 - DNA, 20 bp, Artificial Sequence
  Chr1p_2  Forward Primer
aaaccaaccaacagtcccag

SEQ ID NO: 26355 - DNA, 20 bp, Artificial Sequence
  Chr1p_2  Forward Primer
cgtggaggaagaccatgaat

SEQ ID NO: 26356 - DNA, 20 bp, Artificial Sequence
  Chr1p_2  Forward Primer
ggagagctgtggcttctcat

SEQ ID NO: 26357 - DNA, 20 bp, Artificial Sequence
  Chr1p_2  Forward Primer
gagggtcacagagcgagact

SEQ ID NO: 26358 - DNA, 20 bp, Artificial Sequence
  Chr1p_2  Forward Primer
aagtcagtttgctggtccgt

SEQ ID NO: 26359 - DNA, 20 bp, Artificial Sequence
  Chr1p_2  Forward Primer
gtagacacaggccctgcctt

SEQ ID NO: 26360 - DNA, 20 bp, Artificial Sequence
  Chr1p_2  Forward Primer
cccctagagggacagagacc

SEQ ID NO: 26361 - DNA, 19 bp, Artificial Sequence
  Chr1p_2  Forward Primer
cctcaccaatgcagatgct

SEQ ID NO: 26362 - DNA, 20 bp, Artificial Sequence
  Chr1p_2  Forward Primer
tgagttccagagagggagga

SEQ ID NO: 26363 - DNA, 20 bp, Artificial Sequence
  Chr1p_2  Forward Primer
atccccagctctgggtagtg

SEQ ID NO: 26364 - DNA, 20 bp, Artificial Sequence
  Chr1p_2  Forward Primer
agttggaggcaaggttagca

SEQ ID NO: 26365 - DNA, 20 bp, Artificial Sequence
  Chr1p_2  Forward Primer
caagaaccacagcccaaagt

SEQ ID NO: 26366 - DNA, 20 bp, Artificial Sequence
  Chr1p_2  Forward Primer
cagggaggtgcttgagaaag

SEQ ID NO: 26367 - DNA, 20 bp, Artificial Sequence
  Chr1p_2  Forward Primer
tttcacccctacaacttggg

SEQ ID NO: 26368 - DNA, 20 bp, Artificial Sequence
  Chr1p_2  Forward Primer
tgcagcttcctgaaaacaga

SEQ ID NO: 26369 - DNA, 20 bp, Artificial Sequence
  Chr1p_2  Reverse Primer
agggtgaagtgactcatcgg

SEQ ID NO: 26370 - DNA, 20 bp, Artificial Sequence
  Chr1p_2  Reverse Primer
gtcaccagtcgcctcagatt

SEQ ID NO: 26371 - DNA, 20 bp, Artificial Sequence
  Chr1p_2  Reverse Primer
tgctggcaaaatgaagacag

SEQ ID NO: 26372 - DNA, 20 bp, Artificial Sequence
  Chr1p_2  Reverse Primer
gagggcaatgaaggattacg

SEQ ID NO: 26373 - DNA, 20 bp, Artificial Sequence
  Chr1p_2  Reverse Primer
gtgggaccaatcctgactgt

SEQ ID NO: 26374 - DNA, 20 bp, Artificial Sequence
  Chr1p_2  Reverse Primer
catcatggacatggctgaag

SEQ ID NO: 26375 - DNA, 20 bp, Artificial Sequence
  Chr1p_2  Reverse Primer
gcacagcagagaccaaatga

SEQ ID NO: 26376 - DNA, 20 bp, Artificial Sequence
  Chr1p_2  Reverse Primer
gtttggatcccaagcacagt

SEQ ID NO: 26377 - DNA, 20 bp, Artificial Sequence
  Chr1p_2  Reverse Primer
attttcctcagtggagcacg

SEQ ID NO: 26378 - DNA, 20 bp, Artificial Sequence
  Chr1p_2  Reverse Primer
ccagctccaacatcagtgac

SEQ ID NO: 26379 - DNA, 20 bp, Artificial Sequence
  Chr1p_2  Reverse Primer
atctgtgttgcatgagctgc

SEQ ID NO: 26380 - DNA, 20 bp, Artificial Sequence
  Chr1p_2  Reverse Primer
gtttgcaagcccaggagata

SEQ ID NO: 26381 - DNA, 21 bp, Artificial Sequence
  Chr1p_2  Reverse Primer
ctaaagttgatgacgcaagca

SEQ ID NO: 26382 - DNA, 20 bp, Artificial Sequence
  Chr1p_2  Reverse Primer
gacgccacagctatgagaga

SEQ ID NO: 26383 - DNA, 20 bp, Artificial Sequence
  Chr1p_2  Reverse Primer
ctccacccagcagtaagctc

SEQ ID NO: 26384 - DNA, 20 bp, Artificial Sequence
  Chr1p_2  Reverse Primer
tcttggcagtgacaaagtgc

SEQ ID NO: 26385 - DNA, 20 bp, Artificial Sequence
  Chr1p_2  Reverse Primer
cagccagaactaggcaaagg

SEQ ID NO: 26386 - DNA, 20 bp, Artificial Sequence
  Chr1p_2  Reverse Primer
aaagagggagcctgaggaag

SEQ ID NO: 26387 - DNA, 20 bp, Artificial Sequence
  Chr1p_2  Reverse Primer
atgagggcatgaagttggac

SEQ ID NO: 26388 - DNA, 20 bp, Artificial Sequence
  Chr1p_2  Reverse Primer
agagggttagtctgggctcc

SEQ ID NO: 26389 - DNA, 20 bp, Artificial Sequence
  Chr1p_2  Reverse Primer
cctcccttatatgggcacct

SEQ ID NO: 26390 - DNA, 20 bp, Artificial Sequence
  Chr1p_2  Reverse Primer
tttcccagtgcccttaacag

SEQ ID NO: 26391 - DNA, 20 bp, Artificial Sequence
  Chr1p_2  Reverse Primer
gctcattctcacttggcctc

SEQ ID NO: 26392 - DNA, 20 bp, Artificial Sequence
  Chr1p_2  Reverse Primer
gcggctggtagaagatgaat

SEQ ID NO: 26393 - DNA, 20 bp, Artificial Sequence
  Chr1p_2  Reverse Primer
tccagatcctctatggtggc

SEQ ID NO: 26394 - DNA, 20 bp, Artificial Sequence
  Chr1p_2  Reverse Primer
agcacctcactgatgcctct

SEQ ID NO: 26395 - DNA, 20 bp, Artificial Sequence
  Chr1p_2  Reverse Primer
cccctggttcatcatttcag

SEQ ID NO: 26396 - DNA, 20 bp, Artificial Sequence
  Chr1p_2  Reverse Primer
agccctcggtaaggagaaag

SEQ ID NO: 26397 - DNA, 20 bp, Artificial Sequence
  Chr1p_2  Reverse Primer
ttggtgatccacgtttctga

SEQ ID NO: 26398 - DNA, 20 bp, Artificial Sequence
  Chr1p_2  Reverse Primer
tgaagcaaattgagcatctg

SEQ ID NO: 26399 - DNA, 20 bp, Artificial Sequence
  Chr1p_2  Reverse Primer
cacagtctgatggcagagga

SEQ ID NO: 26400 - DNA, 20 bp, Artificial Sequence
  Chr1p_2  Reverse Primer
agaggccagaggatttggtt

SEQ ID NO: 26401 - DNA, 20 bp, Artificial Sequence
  Chr1p_2  Reverse Primer
tccagctctgtggtgacatc

SEQ ID NO: 26402 - DNA, 20 bp, Artificial Sequence
  Chr1p_2  Reverse Primer
catgtactcgggctctgagg

SEQ ID NO: 26403 - DNA, 20 bp, Artificial Sequence
  Chr1p_2  Reverse Primer
ctaggggagagtggcttgaa

SEQ ID NO: 26404 - DNA, 20 bp, Artificial Sequence
  Chr1p_2  Reverse Primer
taaacgtgccctagactgcc

SEQ ID NO: 26405 - DNA, 20 bp, Artificial Sequence
  Chr1p_2  Reverse Primer
ctgacagactcctcagcacg

SEQ ID NO: 26406 - DNA, 20 bp, Artificial Sequence
  Chr1p_2  Reverse Primer
tacaaccaagggccagactc

SEQ ID NO: 26407 - DNA, 20 bp, Artificial Sequence
  Chr1p_2  Reverse Primer
ccatcaaggcgtgtcctaac

SEQ ID NO: 26408 - DNA, 20 bp, Artificial Sequence
  Chr1p_2  Reverse Primer
caggtgtgagtcactgctcc

SEQ ID NO: 26409 - DNA, 20 bp, Artificial Sequence
  Chr1p_2  Reverse Primer
ttaaaaaggtgcacaagggg

SEQ ID NO: 26410 - DNA, 20 bp, Artificial Sequence
  Chr1p_2  Reverse Primer
tcgcagtaaaccctgaaagc

SEQ ID NO: 26411 - DNA, 20 bp, Artificial Sequence
  Chr1p_2  Reverse Primer
tgtggaggtccagaggaaag

SEQ ID NO: 26412 - DNA, 20 bp, Artificial Sequence
  Chr1p_2  Reverse Primer
ggacctgttgctccatgact

SEQ ID NO: 26413 - DNA, 20 bp, Artificial Sequence
  Chr1p_2  Reverse Primer
catgtttcgacccagtcctt

SEQ ID NO: 26414 - DNA, 20 bp, Artificial Sequence
  Chr1p_2  Reverse Primer
gaaccacaccccagtcaagt

SEQ ID NO: 26415 - DNA, 20 bp, Artificial Sequence
  Chr1p_2  Reverse Primer
tggtcattgtagcccatcaa

SEQ ID NO: 26416 - DNA, 26 bp, Artificial Sequence
  Chr1p_2  Reverse Primer
tgtaggtggttatttttaaagtcgtc

SEQ ID NO: 26417 - DNA, 20 bp, Artificial Sequence
  Chr1p_2  Reverse Primer
gaaccctcagtgttgcccta

SEQ ID NO: 26418 - DNA, 20 bp, Artificial Sequence
  Chr1p_2  Reverse Primer
cagcaggaagtgagggaaac

SEQ ID NO: 26419 - DNA, 20 bp, Artificial Sequence
  Chr1p_2  Reverse Primer
cctaaaggaagtcccctgct

SEQ ID NO: 26420 - DNA, 20 bp, Artificial Sequence
  Chr1p_2  Reverse Primer
actacatccacagcccaagc

SEQ ID NO: 26421 - DNA, 20 bp, Artificial Sequence
  Chr1p_2  Reverse Primer
tggcagaatctcctacaccc

SEQ ID NO: 26422 - DNA, 20 bp, Artificial Sequence
  Chr1p_2  Reverse Primer
aattttcttgttcatggcgg

SEQ ID NO: 26423 - DNA, 20 bp, Artificial Sequence
  Chr1p_2  Reverse Primer
tgagttccaatcccagctct

SEQ ID NO: 26424 - DNA, 20 bp, Artificial Sequence
  Chr1p_2  Reverse Primer
gctgacaccctctgatccat

SEQ ID NO: 26425 - DNA, 20 bp, Artificial Sequence
  Chr1p_2  Reverse Primer
tctcacagatggggaaaagg

SEQ ID NO: 26426 - DNA, 20 bp, Artificial Sequence
  Chr1p_2  Reverse Primer
aatggtacgagactgggtgc

SEQ ID NO: 26427 - DNA, 20 bp, Artificial Sequence
  Chr1p_2  Reverse Primer
gatgaagcactgagccaaca

SEQ ID NO: 26428 - DNA, 20 bp, Artificial Sequence
  Chr1p_2  Reverse Primer
ttctccagctgtcctgtgtg

SEQ ID NO: 26429 - DNA, 20 bp, Artificial Sequence
  Chr1p_2  Reverse Primer
atcagggagggtggaaagat

SEQ ID NO: 26430 - DNA, 20 bp, Artificial Sequence
  Chr1p_2  Reverse Primer
aaagatgagtgatggctggg

SEQ ID NO: 26431 - DNA, 21 bp, Artificial Sequence
  Chr1p_2  Reverse Primer
aaatttcattcattccccagg

SEQ ID NO: 26432 - DNA, 20 bp, Artificial Sequence
  Chr1p_2  Reverse Primer
gaatacagctggccatgtca

SEQ ID NO: 26433 - DNA, 20 bp, Artificial Sequence
  Chr1p_2  Reverse Primer
agtggcaaccaaattctcag

SEQ ID NO: 26434 - DNA, 20 bp, Artificial Sequence
  Chr1p_2  Reverse Primer
ttgaaacagccacaagatgg

SEQ ID NO: 26435 - DNA, 20 bp, Artificial Sequence
  Chr1p_2  Reverse Primer
aggccacattatgaagccag

SEQ ID NO: 26436 - DNA, 21 bp, Artificial Sequence
  Chr1p_2  Reverse Primer
ctccagtgcttagaaccatgc

SEQ ID NO: 26437 - DNA, 20 bp, Artificial Sequence
  Chr1p_2  Reverse Primer
cttgattggtcaggtgaggg

SEQ ID NO: 26438 - DNA, 20 bp, Artificial Sequence
  Chr1p_2  Reverse Primer
ctatagtcagagggtcgccg

SEQ ID NO: 26439 - DNA, 20 bp, Artificial Sequence
  Chr1p_2  Reverse Primer
aagcctttccctggaagtgt

SEQ ID NO: 26440 - DNA, 20 bp, Artificial Sequence
  Chr1p_2  Reverse Primer
aggagctccagattgagcag

SEQ ID NO: 26441 - DNA, 20 bp, Artificial Sequence
  Chr1p_2  Reverse Primer
gagtggctgccagaacctac

SEQ ID NO: 26442 - DNA, 19 bp, Artificial Sequence
  Chr1p_2  Reverse Primer
actcctggtgctggcattt

SEQ ID NO: 26443 - DNA, 20 bp, Artificial Sequence
  Chr1p_2  Reverse Primer
ggcctcttctcaaagcactg

SEQ ID NO: 26444 - DNA, 20 bp, Artificial Sequence
  Chr1p_2  Reverse Primer
cacggtcagagaaacaagca

SEQ ID NO: 26445 - DNA, 20 bp, Artificial Sequence
  Chr1p_2  Reverse Primer
aggatgaggatgcaggacag

SEQ ID NO: 26446 - DNA, 20 bp, Artificial Sequence
  Chr1p_2  Reverse Primer
aattgaaggcaacgaggcta

SEQ ID NO: 26447 - DNA, 20 bp, Artificial Sequence
  Chr1p_2  Reverse Primer
aggtgcgggctagagataca

SEQ ID NO: 26448 - DNA, 20 bp, Artificial Sequence
  Chr1p_2  Reverse Primer
tggagaagccacagagacct

SEQ ID NO: 26449 - DNA, 20 bp, Artificial Sequence
  Chr1p_2  Reverse Primer
agatgctgtttcatgtgcca

SEQ ID NO: 26450 - DNA, 20 bp, Artificial Sequence
  Chr1p_2  Reverse Primer
ggaagagctggtgtccagag

SEQ ID NO: 26451 - DNA, 20 bp, Artificial Sequence
  Chr1p_2  Reverse Primer
caggccttagctcactccac

SEQ ID NO: 26452 - DNA, 20 bp, Artificial Sequence
  Chr1p_2  Reverse Primer
accagtggttcaggctctgt

SEQ ID NO: 26453 - DNA, 20 bp, Artificial Sequence
  Chr1p_2  Reverse Primer
tgcctgcagtacacaaaagc

SEQ ID NO: 26454 - DNA, 20 bp, Artificial Sequence
  Chr1p_2  Reverse Primer
ctcccctttcttatcctggc

SEQ ID NO: 26455 - DNA, 20 bp, Artificial Sequence
  Chr1p_2  Reverse Primer
agaggaccagaggtccaggt

SEQ ID NO: 26456 - DNA, 20 bp, Artificial Sequence
  Chr1p_2  Reverse Primer
ctggatcttgcagtcagggt

SEQ ID NO: 26457 - DNA, 19 bp, Artificial Sequence
  Chr1p_2  Reverse Primer
cacctgcccaacctaggac

SEQ ID NO: 26458 - DNA, 20 bp, Artificial Sequence
  Chr1p_2  Reverse Primer
cactgcctagtcccagtggt

SEQ ID NO: 26459 - DNA, 19 bp, Artificial Sequence
  Chr1p_2  Reverse Primer
atgtgaccccagggacttc

SEQ ID NO: 26460 - DNA, 20 bp, Artificial Sequence
  Chr1p_2  Reverse Primer
caggacagcatagcccagtt

SEQ ID NO: 26461 - DNA, 18 bp, Artificial Sequence
  Chr1p_2  Reverse Primer
gtggtcttcctacccccg

SEQ ID NO: 26462 - DNA, 20 bp, Artificial Sequence
  Chr1p_2  Reverse Primer
gagggtagtggggacattca

SEQ ID NO: 26463 - DNA, 21 bp, Artificial Sequence
  Chr1p_2  Reverse Primer
gcaatgcatctcaccgttagt

SEQ ID NO: 26464 - DNA, 20 bp, Artificial Sequence
  Chr1p_2  Reverse Primer
tgtatcaggagtgtgcccaa

SEQ ID NO: 26465 - DNA, 20 bp, Artificial Sequence
  Chr1p_3  Forward Primer
atctgtaacacaggtggccc

SEQ ID NO: 26466 - DNA, 20 bp, Artificial Sequence
  Chr1p_3  Forward Primer
gctttcttgctcatttcgct

SEQ ID NO: 26467 - DNA, 20 bp, Artificial Sequence
  Chr1p_3  Forward Primer
ctccccaggaaatgaagaca

SEQ ID NO: 26468 - DNA, 20 bp, Artificial Sequence
  Chr1p_3  Forward Primer
aagtgagaagggtggcaatg

SEQ ID NO: 26469 - DNA, 20 bp, Artificial Sequence
  Chr1p_3  Forward Primer
gcagactcttgcagcatcac

SEQ ID NO: 26470 - DNA, 20 bp, Artificial Sequence
  Chr1p_3  Forward Primer
ggaaaaggaagtggcttcaa

SEQ ID NO: 26471 - DNA, 20 bp, Artificial Sequence
  Chr1p_3  Forward Primer
tgtgtgcagctctcaccttc

SEQ ID NO: 26472 - DNA, 20 bp, Artificial Sequence
  Chr1p_3  Forward Primer
aacccaaggccaagaaaagt

SEQ ID NO: 26473 - DNA, 20 bp, Artificial Sequence
  Chr1p_3  Forward Primer
cagtgacatggaggacagga

SEQ ID NO: 26474 - DNA, 20 bp, Artificial Sequence
  Chr1p_3  Forward Primer
aattccttgctcattgcagg

SEQ ID NO: 26475 - DNA, 20 bp, Artificial Sequence
  Chr1p_3  Forward Primer
tgttccgtctttacttgccc

SEQ ID NO: 26476 - DNA, 20 bp, Artificial Sequence
  Chr1p_3  Forward Primer
aaagaaacacacgtggaggg

SEQ ID NO: 26477 - DNA, 20 bp, Artificial Sequence
  Chr1p_3  Forward Primer
gcaacaggaaaatccgaaaa

SEQ ID NO: 26478 - DNA, 20 bp, Artificial Sequence
  Chr1p_3  Forward Primer
ccatttgaggcctgagtgtt

SEQ ID NO: 26479 - DNA, 25 bp, Artificial Sequence
  Chr1p_3  Forward Primer
gaagaattccaaattgaaaagattg

SEQ ID NO: 26480 - DNA, 20 bp, Artificial Sequence
  Chr1p_3  Forward Primer
gcacacctagtgcacgactc

SEQ ID NO: 26481 - DNA, 20 bp, Artificial Sequence
  Chr1p_3  Forward Primer
ccttggtgcaccttggttat

SEQ ID NO: 26482 - DNA, 20 bp, Artificial Sequence
  Chr1p_3  Forward Primer
atatgttcaaggggccatca

SEQ ID NO: 26483 - DNA, 22 bp, Artificial Sequence
  Chr1p_3  Forward Primer
tcttctatgctccaaatgttcc

SEQ ID NO: 26484 - DNA, 20 bp, Artificial Sequence
  Chr1p_3  Forward Primer
tccctggagagaaatccctt

SEQ ID NO: 26485 - DNA, 20 bp, Artificial Sequence
  Chr1p_3  Forward Primer
tcttgttgacctcctccaca

SEQ ID NO: 26486 - DNA, 20 bp, Artificial Sequence
  Chr1p_3  Forward Primer
aaccacaagggagagggagt

SEQ ID NO: 26487 - DNA, 24 bp, Artificial Sequence
  Chr1p_3  Forward Primer
ttttcccattcttaaagacacctt

SEQ ID NO: 26488 - DNA, 20 bp, Artificial Sequence
  Chr1p_3  Forward Primer
gctgcaaggataatgaagcc

SEQ ID NO: 26489 - DNA, 20 bp, Artificial Sequence
  Chr1p_3  Forward Primer
ctcatcattccagggcctaa

SEQ ID NO: 26490 - DNA, 23 bp, Artificial Sequence
  Chr1p_3  Forward Primer
ggttaagtaattctgctgaaccg

SEQ ID NO: 26491 - DNA, 20 bp, Artificial Sequence
  Chr1p_3  Forward Primer
tcaaatgggaaaaatcaggc

SEQ ID NO: 26492 - DNA, 20 bp, Artificial Sequence
  Chr1p_3  Forward Primer
tctaagtctcctggggctca

SEQ ID NO: 26493 - DNA, 20 bp, Artificial Sequence
  Chr1p_3  Forward Primer
tggtcaaaaggagcaactga

SEQ ID NO: 26494 - DNA, 20 bp, Artificial Sequence
  Chr1p_3  Forward Primer
ttacctctggagggcaagaa

SEQ ID NO: 26495 - DNA, 20 bp, Artificial Sequence
  Chr1p_3  Forward Primer
gatggggaccagaaaagtga

SEQ ID NO: 26496 - DNA, 20 bp, Artificial Sequence
  Chr1p_3  Forward Primer
gccctacaccagcaaatgtt

SEQ ID NO: 26497 - DNA, 20 bp, Artificial Sequence
  Chr1p_3  Forward Primer
aaaagtgaataatcccgccc

SEQ ID NO: 26498 - DNA, 20 bp, Artificial Sequence
  Chr1p_3  Forward Primer
gtggcattcctggtctatgg

SEQ ID NO: 26499 - DNA, 20 bp, Artificial Sequence
  Chr1p_3  Forward Primer
acctcatgggatcaaaggtg

SEQ ID NO: 26500 - DNA, 20 bp, Artificial Sequence
  Chr1p_3  Forward Primer
tgtgaacagctgccatcttc

SEQ ID NO: 26501 - DNA, 26 bp, Artificial Sequence
  Chr1p_3  Forward Primer
cagagtaaagatattatgccaacaca

SEQ ID NO: 26502 - DNA, 20 bp, Artificial Sequence
  Chr1p_3  Forward Primer
tgaaacagattaggggccag

SEQ ID NO: 26503 - DNA, 20 bp, Artificial Sequence
  Chr1p_3  Forward Primer
taagtggttcccagcgtttc

SEQ ID NO: 26504 - DNA, 20 bp, Artificial Sequence
  Chr1p_3  Forward Primer
gaagtgctttctcaccacga

SEQ ID NO: 26505 - DNA, 23 bp, Artificial Sequence
  Chr1p_3  Forward Primer
gaggacattagggagttttcgtt

SEQ ID NO: 26506 - DNA, 20 bp, Artificial Sequence
  Chr1p_3  Forward Primer
gtaccaaaggtggtggtggt

SEQ ID NO: 26507 - DNA, 20 bp, Artificial Sequence
  Chr1p_3  Forward Primer
agagcatttgttcagggtgc

SEQ ID NO: 26508 - DNA, 20 bp, Artificial Sequence
  Chr1p_3  Forward Primer
acccagcccactggttttag

SEQ ID NO: 26509 - DNA, 21 bp, Artificial Sequence
  Chr1p_3  Forward Primer
caatgttccccaacattctct

SEQ ID NO: 26510 - DNA, 20 bp, Artificial Sequence
  Chr1p_3  Forward Primer
tttatgagcgccaataagcc

SEQ ID NO: 26511 - DNA, 20 bp, Artificial Sequence
  Chr1p_3  Forward Primer
tttcagggagaacaccatcc

SEQ ID NO: 26512 - DNA, 20 bp, Artificial Sequence
  Chr1p_3  Forward Primer
gcttcgagtggctgctctat

SEQ ID NO: 26513 - DNA, 20 bp, Artificial Sequence
  Chr1p_3  Forward Primer
tcaagccttcacggttttct

SEQ ID NO: 26514 - DNA, 20 bp, Artificial Sequence
  Chr1p_3  Forward Primer
agaagcgctctcttgcaaac

SEQ ID NO: 26515 - DNA, 20 bp, Artificial Sequence
  Chr1p_3  Forward Primer
ggaaatccaatccaagcaag

SEQ ID NO: 26516 - DNA, 20 bp, Artificial Sequence
  Chr1p_3  Forward Primer
agtgcgcagcacagatacag

SEQ ID NO: 26517 - DNA, 20 bp, Artificial Sequence
  Chr1p_3  Forward Primer
atcactgtatccccagcacc

SEQ ID NO: 26518 - DNA, 20 bp, Artificial Sequence
  Chr1p_3  Forward Primer
gtcattgccacaagagggac

SEQ ID NO: 26519 - DNA, 20 bp, Artificial Sequence
  Chr1p_3  Forward Primer
cgccgcatgatctttaactt

SEQ ID NO: 26520 - DNA, 25 bp, Artificial Sequence
  Chr1p_3  Forward Primer
tcaacatggttagatctcaaaaaca

SEQ ID NO: 26521 - DNA, 21 bp, Artificial Sequence
  Chr1p_3  Forward Primer
aattccagatgaccagtgcag

SEQ ID NO: 26522 - DNA, 20 bp, Artificial Sequence
  Chr1p_3  Forward Primer
aaccccacaattcagcaaag

SEQ ID NO: 26523 - DNA, 20 bp, Artificial Sequence
  Chr1p_3  Forward Primer
ggctgcatcttgtaggcttt

SEQ ID NO: 26524 - DNA, 20 bp, Artificial Sequence
  Chr1p_3  Forward Primer
attcaccgcctgcttaacac

SEQ ID NO: 26525 - DNA, 20 bp, Artificial Sequence
  Chr1p_3  Forward Primer
tggccagttactgagacacg

SEQ ID NO: 26526 - DNA, 20 bp, Artificial Sequence
  Chr1p_3  Forward Primer
tggaaactcaggagcctttg

SEQ ID NO: 26527 - DNA, 20 bp, Artificial Sequence
  Chr1p_3  Forward Primer
ccgtgcattttctttctcct

SEQ ID NO: 26528 - DNA, 24 bp, Artificial Sequence
  Chr1p_3  Forward Primer
gcaatctactgctcaatctgaaaa

SEQ ID NO: 26529 - DNA, 20 bp, Artificial Sequence
  Chr1p_3  Forward Primer
gtttgtttctgcacccattg

SEQ ID NO: 26530 - DNA, 20 bp, Artificial Sequence
  Chr1p_3  Forward Primer
ccagagaaatggggtcagaa

SEQ ID NO: 26531 - DNA, 20 bp, Artificial Sequence
  Chr1p_3  Forward Primer
gaaagaactccacggcaact

SEQ ID NO: 26532 - DNA, 25 bp, Artificial Sequence
  Chr1p_3  Forward Primer
tccttcactctacttgttagctgag

SEQ ID NO: 26533 - DNA, 21 bp, Artificial Sequence
  Chr1p_3  Forward Primer
tgagcaatacctcccaaaaca

SEQ ID NO: 26534 - DNA, 20 bp, Artificial Sequence
  Chr1p_3  Forward Primer
acacagcccatcgtctaagc

SEQ ID NO: 26535 - DNA, 20 bp, Artificial Sequence
  Chr1p_3  Forward Primer
tgaacaggggacacaaaaca

SEQ ID NO: 26536 - DNA, 20 bp, Artificial Sequence
  Chr1p_3  Forward Primer
ggggctccgaactagtgaag

SEQ ID NO: 26537 - DNA, 20 bp, Artificial Sequence
  Chr1p_3  Forward Primer
ttctgataggctggggagtg

SEQ ID NO: 26538 - DNA, 20 bp, Artificial Sequence
  Chr1p_3  Forward Primer
gcactcacgaggtcaactca

SEQ ID NO: 26539 - DNA, 21 bp, Artificial Sequence
  Chr1p_3  Forward Primer
tgatgctgcactaagctagga

SEQ ID NO: 26540 - DNA, 22 bp, Artificial Sequence
  Chr1p_3  Forward Primer
agcttaccatgtggacacagaa

SEQ ID NO: 26541 - DNA, 22 bp, Artificial Sequence
  Chr1p_3  Forward Primer
cccttaaaaggaaagaggaaca

SEQ ID NO: 26542 - DNA, 20 bp, Artificial Sequence
  Chr1p_3  Forward Primer
caaaaggaccctcactgcat

SEQ ID NO: 26543 - DNA, 21 bp, Artificial Sequence
  Chr1p_3  Forward Primer
tgaaatgcttgaatgcagaaa

SEQ ID NO: 26544 - DNA, 20 bp, Artificial Sequence
  Chr1p_3  Forward Primer
caaaggcagtgtggcagata

SEQ ID NO: 26545 - DNA, 20 bp, Artificial Sequence
  Chr1p_3  Forward Primer
tttccaaacactgtcctccc

SEQ ID NO: 26546 - DNA, 20 bp, Artificial Sequence
  Chr1p_3  Forward Primer
tgatctggctctaccatcca

SEQ ID NO: 26547 - DNA, 20 bp, Artificial Sequence
  Chr1p_3  Forward Primer
ccaaagtcacaaatgttggc

SEQ ID NO: 26548 - DNA, 27 bp, Artificial Sequence
  Chr1p_3  Forward Primer
ataaataatgatcttcatgtgaaagtg

SEQ ID NO: 26549 - DNA, 21 bp, Artificial Sequence
  Chr1p_3  Forward Primer
gggtcaaatcatcataagcca

SEQ ID NO: 26550 - DNA, 20 bp, Artificial Sequence
  Chr1p_3  Forward Primer
gtctgggggaagatgtttga

SEQ ID NO: 26551 - DNA, 20 bp, Artificial Sequence
  Chr1p_3  Forward Primer
caacctcatgccctactgtg

SEQ ID NO: 26552 - DNA, 20 bp, Artificial Sequence
  Chr1p_3  Forward Primer
ggggaaaggaagtccctaga

SEQ ID NO: 26553 - DNA, 20 bp, Artificial Sequence
  Chr1p_3  Forward Primer
ccagaggaagagcacaggac

SEQ ID NO: 26554 - DNA, 20 bp, Artificial Sequence
  Chr1p_3  Forward Primer
cactgggtatctggggaatg

SEQ ID NO: 26555 - DNA, 20 bp, Artificial Sequence
  Chr1p_3  Forward Primer
aaagcctagggtgactgtgg

SEQ ID NO: 26556 - DNA, 20 bp, Artificial Sequence
  Chr1p_3  Forward Primer
ccaagagcttgcctgagaat

SEQ ID NO: 26557 - DNA, 20 bp, Artificial Sequence
  Chr1p_3  Forward Primer
gcatttgatgaggaaagcaa

SEQ ID NO: 26558 - DNA, 20 bp, Artificial Sequence
  Chr1p_3  Forward Primer
cttctcttgccagcacaaaa

SEQ ID NO: 26559 - DNA, 23 bp, Artificial Sequence
  Chr1p_3  Forward Primer
agacccagttaagtccctttctc

SEQ ID NO: 26560 - DNA, 21 bp, Artificial Sequence
  Chr1p_3  Forward Primer
gtaggaattaggcttggggaa

SEQ ID NO: 26561 - DNA, 20 bp, Artificial Sequence
  Chr1p_3  Reverse Primer
tcaggtagtgtgtgccaggt

SEQ ID NO: 26562 - DNA, 20 bp, Artificial Sequence
  Chr1p_3  Reverse Primer
ttctgtgggagcataatcca

SEQ ID NO: 26563 - DNA, 20 bp, Artificial Sequence
  Chr1p_3  Reverse Primer
tgtgttggggttctaatgcc

SEQ ID NO: 26564 - DNA, 20 bp, Artificial Sequence
  Chr1p_3  Reverse Primer
gaaagtaactgcagcccagc

SEQ ID NO: 26565 - DNA, 20 bp, Artificial Sequence
  Chr1p_3  Reverse Primer
cagcccccagaaatctgata

SEQ ID NO: 26566 - DNA, 20 bp, Artificial Sequence
  Chr1p_3  Reverse Primer
caagggaccaactgttctgg

SEQ ID NO: 26567 - DNA, 20 bp, Artificial Sequence
  Chr1p_3  Reverse Primer
ggggaaggcagattttgatt

SEQ ID NO: 26568 - DNA, 20 bp, Artificial Sequence
  Chr1p_3  Reverse Primer
gtgctgtccatccaactcag

SEQ ID NO: 26569 - DNA, 20 bp, Artificial Sequence
  Chr1p_3  Reverse Primer
gctttttgctttggtgcatt

SEQ ID NO: 26570 - DNA, 20 bp, Artificial Sequence
  Chr1p_3  Reverse Primer
acctgcttaccaatgcctgt

SEQ ID NO: 26571 - DNA, 20 bp, Artificial Sequence
  Chr1p_3  Reverse Primer
ggcattaaagcaaaggtgga

SEQ ID NO: 26572 - DNA, 20 bp, Artificial Sequence
  Chr1p_3  Reverse Primer
gaagcacatggctttcaaca

SEQ ID NO: 26573 - DNA, 20 bp, Artificial Sequence
  Chr1p_3  Reverse Primer
tggcacaagaatttgtcagg

SEQ ID NO: 26574 - DNA, 21 bp, Artificial Sequence
  Chr1p_3  Reverse Primer
gccagaagaagggtttaaagg

SEQ ID NO: 26575 - DNA, 24 bp, Artificial Sequence
  Chr1p_3  Reverse Primer
aaaccttgtcctgtcagtatttga

SEQ ID NO: 26576 - DNA, 20 bp, Artificial Sequence
  Chr1p_3  Reverse Primer
agagctggacaccctctcaa

SEQ ID NO: 26577 - DNA, 20 bp, Artificial Sequence
  Chr1p_3  Reverse Primer
atattggagtggtgggatgc

SEQ ID NO: 26578 - DNA, 20 bp, Artificial Sequence
  Chr1p_3  Reverse Primer
atgatggtaccctgggtttg

SEQ ID NO: 26579 - DNA, 19 bp, Artificial Sequence
  Chr1p_3  Reverse Primer
cctggcccacaaatctttt

SEQ ID NO: 26580 - DNA, 20 bp, Artificial Sequence
  Chr1p_3  Reverse Primer
acatccttgtcacttcccca

SEQ ID NO: 26581 - DNA, 20 bp, Artificial Sequence
  Chr1p_3  Reverse Primer
aggttttagacggaggtggg

SEQ ID NO: 26582 - DNA, 20 bp, Artificial Sequence
  Chr1p_3  Reverse Primer
cctgcctttcctcttcacac

SEQ ID NO: 26583 - DNA, 21 bp, Artificial Sequence
  Chr1p_3  Reverse Primer
tcctcctaaaaaggaaatggg

SEQ ID NO: 26584 - DNA, 20 bp, Artificial Sequence
  Chr1p_3  Reverse Primer
accacctaacccctccctct

SEQ ID NO: 26585 - DNA, 20 bp, Artificial Sequence
  Chr1p_3  Reverse Primer
tcatttgcccaattctaccc

SEQ ID NO: 26586 - DNA, 20 bp, Artificial Sequence
  Chr1p_3  Reverse Primer
ttaatttgaaatgctgcccc

SEQ ID NO: 26587 - DNA, 20 bp, Artificial Sequence
  Chr1p_3  Reverse Primer
atgttacgccacagcatcag

SEQ ID NO: 26588 - DNA, 20 bp, Artificial Sequence
  Chr1p_3  Reverse Primer
ggcgtcattcctgaatctgt

SEQ ID NO: 26589 - DNA, 20 bp, Artificial Sequence
  Chr1p_3  Reverse Primer
tcccggatatatagggacga

SEQ ID NO: 26590 - DNA, 20 bp, Artificial Sequence
  Chr1p_3  Reverse Primer
aggaaagggcagaatggttt

SEQ ID NO: 26591 - DNA, 20 bp, Artificial Sequence
  Chr1p_3  Reverse Primer
gaccattgatgatgccagtg

SEQ ID NO: 26592 - DNA, 20 bp, Artificial Sequence
  Chr1p_3  Reverse Primer
acgtcagccccttagttgtg

SEQ ID NO: 26593 - DNA, 20 bp, Artificial Sequence
  Chr1p_3  Reverse Primer
ttggcctgttccatcttctc

SEQ ID NO: 26594 - DNA, 20 bp, Artificial Sequence
  Chr1p_3  Reverse Primer
gatctttagtgggtgggtgg

SEQ ID NO: 26595 - DNA, 20 bp, Artificial Sequence
  Chr1p_3  Reverse Primer
gggccaaacagagtcaaaga

SEQ ID NO: 26596 - DNA, 20 bp, Artificial Sequence
  Chr1p_3  Reverse Primer
actggctttctgcctgtcat

SEQ ID NO: 26597 - DNA, 20 bp, Artificial Sequence
  Chr1p_3  Reverse Primer
gaccaaatttcctcctttgc

SEQ ID NO: 26598 - DNA, 20 bp, Artificial Sequence
  Chr1p_3  Reverse Primer
atatgtcctctccatccccc

SEQ ID NO: 26599 - DNA, 20 bp, Artificial Sequence
  Chr1p_3  Reverse Primer
tgctctggacttaaaagggc

SEQ ID NO: 26600 - DNA, 20 bp, Artificial Sequence
  Chr1p_3  Reverse Primer
gggaccaataaggaaacagc

SEQ ID NO: 26601 - DNA, 22 bp, Artificial Sequence
  Chr1p_3  Reverse Primer
agaggacatttggtcctcatct

SEQ ID NO: 26602 - DNA, 20 bp, Artificial Sequence
  Chr1p_3  Reverse Primer
cacggctgacattcagtgac

SEQ ID NO: 26603 - DNA, 20 bp, Artificial Sequence
  Chr1p_3  Reverse Primer
cctggcctgaccttttcttt

SEQ ID NO: 26604 - DNA, 20 bp, Artificial Sequence
  Chr1p_3  Reverse Primer
ttgctgctttaaatccctgt

SEQ ID NO: 26605 - DNA, 21 bp, Artificial Sequence
  Chr1p_3  Reverse Primer
gctttgcttttcaccctaaga

SEQ ID NO: 26606 - DNA, 20 bp, Artificial Sequence
  Chr1p_3  Reverse Primer
gcaatatctgtgacagggca

SEQ ID NO: 26607 - DNA, 20 bp, Artificial Sequence
  Chr1p_3  Reverse Primer
gagaacaggaaatcgtggga

SEQ ID NO: 26608 - DNA, 21 bp, Artificial Sequence
  Chr1p_3  Reverse Primer
acttctctttgttgtcctggc

SEQ ID NO: 26609 - DNA, 20 bp, Artificial Sequence
  Chr1p_3  Reverse Primer
aaaaggcttggcaatcagtg

SEQ ID NO: 26610 - DNA, 20 bp, Artificial Sequence
  Chr1p_3  Reverse Primer
gccaagggttctgctttaca

SEQ ID NO: 26611 - DNA, 20 bp, Artificial Sequence
  Chr1p_3  Reverse Primer
taagcccctggagagtttca

SEQ ID NO: 26612 - DNA, 20 bp, Artificial Sequence
  Chr1p_3  Reverse Primer
gaggcgtcttggagaagttg

SEQ ID NO: 26613 - DNA, 20 bp, Artificial Sequence
  Chr1p_3  Reverse Primer
tttggcttgatttgctgttg

SEQ ID NO: 26614 - DNA, 27 bp, Artificial Sequence
  Chr1p_3  Reverse Primer
ctttgacatatgtttttagatctttga

SEQ ID NO: 26615 - DNA, 20 bp, Artificial Sequence
  Chr1p_3  Reverse Primer
cccagtgagtggcaaatgat

SEQ ID NO: 26616 - DNA, 20 bp, Artificial Sequence
  Chr1p_3  Reverse Primer
ctttctcccacccttcctct

SEQ ID NO: 26617 - DNA, 20 bp, Artificial Sequence
  Chr1p_3  Reverse Primer
ttgctctttccttgtccctc

SEQ ID NO: 26618 - DNA, 20 bp, Artificial Sequence
  Chr1p_3  Reverse Primer
tcatcagttgggaacagtgc

SEQ ID NO: 26619 - DNA, 22 bp, Artificial Sequence
  Chr1p_3  Reverse Primer
cccttccttcatggttactttc

SEQ ID NO: 26620 - DNA, 20 bp, Artificial Sequence
  Chr1p_3  Reverse Primer
tctttttaaagcccttgcca

SEQ ID NO: 26621 - DNA, 20 bp, Artificial Sequence
  Chr1p_3  Reverse Primer
tgtacttctgacgggggtgt

SEQ ID NO: 26622 - DNA, 21 bp, Artificial Sequence
  Chr1p_3  Reverse Primer
tttagcaaagcaagaaaagcg

SEQ ID NO: 26623 - DNA, 20 bp, Artificial Sequence
  Chr1p_3  Reverse Primer
tgatggctggacacagctta

SEQ ID NO: 26624 - DNA, 20 bp, Artificial Sequence
  Chr1p_3  Reverse Primer
tgggaacagctgaaacaaca

SEQ ID NO: 26625 - DNA, 19 bp, Artificial Sequence
  Chr1p_3  Reverse Primer
acaggagcaagcctctgtg

SEQ ID NO: 26626 - DNA, 25 bp, Artificial Sequence
  Chr1p_3  Reverse Primer
tggttacgttgtatttcacataagg

SEQ ID NO: 26627 - DNA, 20 bp, Artificial Sequence
  Chr1p_3  Reverse Primer
acccccacatcagaatgaag

SEQ ID NO: 26628 - DNA, 20 bp, Artificial Sequence
  Chr1p_3  Reverse Primer
tcccagtgaaaagagcaacc

SEQ ID NO: 26629 - DNA, 20 bp, Artificial Sequence
  Chr1p_3  Reverse Primer
tgtcctgaggcccaaagtat

SEQ ID NO: 26630 - DNA, 24 bp, Artificial Sequence
  Chr1p_3  Reverse Primer
ggttttgtgtgaattagtcattgg

SEQ ID NO: 26631 - DNA, 20 bp, Artificial Sequence
  Chr1p_3  Reverse Primer
actgtctgctattgggccac

SEQ ID NO: 26632 - DNA, 20 bp, Artificial Sequence
  Chr1p_3  Reverse Primer
ttgtggtagtgctctggacg

SEQ ID NO: 26633 - DNA, 20 bp, Artificial Sequence
  Chr1p_3  Reverse Primer
gagttgaagcatctgtggca

SEQ ID NO: 26634 - DNA, 20 bp, Artificial Sequence
  Chr1p_3  Reverse Primer
tcactgcactttagcttgcg

SEQ ID NO: 26635 - DNA, 22 bp, Artificial Sequence
  Chr1p_3  Reverse Primer
ttgttccattgaagtgcttttg

SEQ ID NO: 26636 - DNA, 22 bp, Artificial Sequence
  Chr1p_3  Reverse Primer
tgtgtaggaatcacatgggtct

SEQ ID NO: 26637 - DNA, 20 bp, Artificial Sequence
  Chr1p_3  Reverse Primer
tcacccccaaaaagtgtagg

SEQ ID NO: 26638 - DNA, 20 bp, Artificial Sequence
  Chr1p_3  Reverse Primer
caaagccttcccaccagata

SEQ ID NO: 26639 - DNA, 21 bp, Artificial Sequence
  Chr1p_3  Reverse Primer
tcatcaaatagagagggcagc

SEQ ID NO: 26640 - DNA, 20 bp, Artificial Sequence
  Chr1p_3  Reverse Primer
ttcagcaaggactcagcaac

SEQ ID NO: 26641 - DNA, 20 bp, Artificial Sequence
  Chr1p_3  Reverse Primer
ggtgtgattggcttgaaggt

SEQ ID NO: 26642 - DNA, 20 bp, Artificial Sequence
  Chr1p_3  Reverse Primer
cgcatattgcgtctgaagaa

SEQ ID NO: 26643 - DNA, 20 bp, Artificial Sequence
  Chr1p_3  Reverse Primer
cccccaccttagaacctcag

SEQ ID NO: 26644 - DNA, 18 bp, Artificial Sequence
  Chr1p_3  Reverse Primer
cttggcttcccaaagctc

SEQ ID NO: 26645 - DNA, 20 bp, Artificial Sequence
  Chr1p_3  Reverse Primer
tgttcccatgacaagcttca

SEQ ID NO: 26646 - DNA, 20 bp, Artificial Sequence
  Chr1p_3  Reverse Primer
caacaaacatgggtgtcctg

SEQ ID NO: 26647 - DNA, 20 bp, Artificial Sequence
  Chr1p_3  Reverse Primer
atttgggtgggggaattaaa

SEQ ID NO: 26648 - DNA, 20 bp, Artificial Sequence
  Chr1p_3  Reverse Primer
aactggtcacaatgggcttt

SEQ ID NO: 26649 - DNA, 20 bp, Artificial Sequence
  Chr1p_3  Reverse Primer
ttccaaaaagctcaaaatgc

SEQ ID NO: 26650 - DNA, 20 bp, Artificial Sequence
  Chr1p_3  Reverse Primer
ctgctggggaaactaggatg

SEQ ID NO: 26651 - DNA, 20 bp, Artificial Sequence
  Chr1p_3  Reverse Primer
ggcctgttctctgctttctg

SEQ ID NO: 26652 - DNA, 21 bp, Artificial Sequence
  Chr1p_3  Reverse Primer
ggagagttctccctcatttgg

SEQ ID NO: 26653 - DNA, 21 bp, Artificial Sequence
  Chr1p_3  Reverse Primer
ttggccctttttatttccatt

SEQ ID NO: 26654 - DNA, 20 bp, Artificial Sequence
  Chr1p_3  Reverse Primer
gcttcctttggctgttttca

SEQ ID NO: 26655 - DNA, 20 bp, Artificial Sequence
  Chr1p_3  Reverse Primer
ctgtccaagggttgggatta

SEQ ID NO: 26656 - DNA, 21 bp, Artificial Sequence
  Chr1p_3  Reverse Primer
agaaaagctttctgctgaccc

SEQ ID NO: 26657 - DNA, 20 bp, Artificial Sequence
  Chr1p_4  Forward Primer
gtgtctggatgctcccctta

SEQ ID NO: 26658 - DNA, 20 bp, Artificial Sequence
  Chr1p_4  Forward Primer
ggcaagttgcttagcctcac

SEQ ID NO: 26659 - DNA, 23 bp, Artificial Sequence
  Chr1p_4  Forward Primer
gggcaggttacctacactaaacc

SEQ ID NO: 26660 - DNA, 20 bp, Artificial Sequence
  Chr1p_4  Forward Primer
taggtcatctcccctccctt

SEQ ID NO: 26661 - DNA, 20 bp, Artificial Sequence
  Chr1p_4  Forward Primer
catcttccccaactgcaact

SEQ ID NO: 26662 - DNA, 18 bp, Artificial Sequence
  Chr1p_4  Forward Primer
cagcactccagggtccag

SEQ ID NO: 26663 - DNA, 21 bp, Artificial Sequence
  Chr1p_4  Forward Primer
gcctgacttggtcttgtcaaa

SEQ ID NO: 26664 - DNA, 20 bp, Artificial Sequence
  Chr1p_4  Forward Primer
actgcattttctctgcaggc

SEQ ID NO: 26665 - DNA, 20 bp, Artificial Sequence
  Chr1p_4  Forward Primer
ccaaagcccagtaaggacag

SEQ ID NO: 26666 - DNA, 23 bp, Artificial Sequence
  Chr1p_4  Forward Primer
gcttgtgtgactttaggcaaaat

SEQ ID NO: 26667 - DNA, 20 bp, Artificial Sequence
  Chr1p_4  Forward Primer
tctgcacacccacagacatt

SEQ ID NO: 26668 - DNA, 20 bp, Artificial Sequence
  Chr1p_4  Forward Primer
gctccttcagcatgtatccc

SEQ ID NO: 26669 - DNA, 20 bp, Artificial Sequence
  Chr1p_4  Forward Primer
cctgcaggaagagcaagata

SEQ ID NO: 26670 - DNA, 20 bp, Artificial Sequence
  Chr1p_4  Forward Primer
tctcctttcctgcacatcaa

SEQ ID NO: 26671 - DNA, 20 bp, Artificial Sequence
  Chr1p_4  Forward Primer
ttgtgaatgaaatgaggcca

SEQ ID NO: 26672 - DNA, 20 bp, Artificial Sequence
  Chr1p_4  Forward Primer
cagtagccctcggagtgttc

SEQ ID NO: 26673 - DNA, 20 bp, Artificial Sequence
  Chr1p_4  Forward Primer
gtcacccactcagcaatcct

SEQ ID NO: 26674 - DNA, 20 bp, Artificial Sequence
  Chr1p_4  Forward Primer
tacattctgagggggctctg

SEQ ID NO: 26675 - DNA, 20 bp, Artificial Sequence
  Chr1p_4  Forward Primer
gccataggactgcaaaggaa

SEQ ID NO: 26676 - DNA, 20 bp, Artificial Sequence
  Chr1p_4  Forward Primer
caatagggctcaggattcca

SEQ ID NO: 26677 - DNA, 20 bp, Artificial Sequence
  Chr1p_4  Forward Primer
tctggcagcaattaaaccct

SEQ ID NO: 26678 - DNA, 20 bp, Artificial Sequence
  Chr1p_4  Forward Primer
ctggaggaagtggcagtgat

SEQ ID NO: 26679 - DNA, 20 bp, Artificial Sequence
  Chr1p_4  Forward Primer
tccccctgcatttcagttag

SEQ ID NO: 26680 - DNA, 20 bp, Artificial Sequence
  Chr1p_4  Forward Primer
gtggaggatgagccagtgag

SEQ ID NO: 26681 - DNA, 20 bp, Artificial Sequence
  Chr1p_4  Forward Primer
cacaggaagtttggggaaga

SEQ ID NO: 26682 - DNA, 22 bp, Artificial Sequence
  Chr1p_4  Forward Primer
cttctgaagcaacacagaaaaa

SEQ ID NO: 26683 - DNA, 20 bp, Artificial Sequence
  Chr1p_4  Forward Primer
ctagaatgggcaagttggga

SEQ ID NO: 26684 - DNA, 20 bp, Artificial Sequence
  Chr1p_4  Forward Primer
ttggaagacaccccaaagac

SEQ ID NO: 26685 - DNA, 20 bp, Artificial Sequence
  Chr1p_4  Forward Primer
ctgatgacgaatggaggagg

SEQ ID NO: 26686 - DNA, 20 bp, Artificial Sequence
  Chr1p_4  Forward Primer
cagcagcctactggaccttc

SEQ ID NO: 26687 - DNA, 20 bp, Artificial Sequence
  Chr1p_4  Forward Primer
agcaccccacagtaagcact

SEQ ID NO: 26688 - DNA, 20 bp, Artificial Sequence
  Chr1p_4  Forward Primer
ggctttgtgcagctatttcc

SEQ ID NO: 26689 - DNA, 20 bp, Artificial Sequence
  Chr1p_4  Forward Primer
caatacccagtccctgcttg

SEQ ID NO: 26690 - DNA, 20 bp, Artificial Sequence
  Chr1p_4  Forward Primer
tcactccaggaatagcccag

SEQ ID NO: 26691 - DNA, 21 bp, Artificial Sequence
  Chr1p_4  Forward Primer
cacaccaattgtccctaatgc

SEQ ID NO: 26692 - DNA, 20 bp, Artificial Sequence
  Chr1p_4  Forward Primer
acctcccaagactcagcaaa

SEQ ID NO: 26693 - DNA, 20 bp, Artificial Sequence
  Chr1p_4  Forward Primer
acactgtgtaacccgcacaa

SEQ ID NO: 26694 - DNA, 20 bp, Artificial Sequence
  Chr1p_4  Forward Primer
caaacgcttcgtaagcatca

SEQ ID NO: 26695 - DNA, 20 bp, Artificial Sequence
  Chr1p_4  Forward Primer
atcaccttgctgcggtattc

SEQ ID NO: 26696 - DNA, 20 bp, Artificial Sequence
  Chr1p_4  Forward Primer
actctgatgcagtgtggggt

SEQ ID NO: 26697 - DNA, 19 bp, Artificial Sequence
  Chr1p_4  Forward Primer
cgaatgtgcggtccttcat

SEQ ID NO: 26698 - DNA, 20 bp, Artificial Sequence
  Chr1p_4  Forward Primer
ttctgacgtcacactcaggc

SEQ ID NO: 26699 - DNA, 20 bp, Artificial Sequence
  Chr1p_4  Forward Primer
aggtggtcaggttgggaaat

SEQ ID NO: 26700 - DNA, 21 bp, Artificial Sequence
  Chr1p_4  Forward Primer
ccccagatcattagagttgga

SEQ ID NO: 26701 - DNA, 20 bp, Artificial Sequence
  Chr1p_4  Forward Primer
ttctttcatgtgggctaggg

SEQ ID NO: 26702 - DNA, 20 bp, Artificial Sequence
  Chr1p_4  Forward Primer
ccactctctcttgccactcc

SEQ ID NO: 26703 - DNA, 20 bp, Artificial Sequence
  Chr1p_4  Forward Primer
atccgtgcctggatcactac

SEQ ID NO: 26704 - DNA, 20 bp, Artificial Sequence
  Chr1p_4  Forward Primer
gagtttcttgacactgcccc

SEQ ID NO: 26705 - DNA, 20 bp, Artificial Sequence
  Chr1p_4  Forward Primer
gctgcaaaacttcagaaggg

SEQ ID NO: 26706 - DNA, 20 bp, Artificial Sequence
  Chr1p_4  Forward Primer
ggatggagcatccacatctt

SEQ ID NO: 26707 - DNA, 20 bp, Artificial Sequence
  Chr1p_4  Forward Primer
gcaccaagcttctgtaaggc

SEQ ID NO: 26708 - DNA, 20 bp, Artificial Sequence
  Chr1p_4  Forward Primer
ggggttaacagaccccagat

SEQ ID NO: 26709 - DNA, 20 bp, Artificial Sequence
  Chr1p_4  Forward Primer
ggcaaacctgacttgacaca

SEQ ID NO: 26710 - DNA, 20 bp, Artificial Sequence
  Chr1p_4  Forward Primer
cactgccctatcatcccact

SEQ ID NO: 26711 - DNA, 20 bp, Artificial Sequence
  Chr1p_4  Forward Primer
gataatggggttggaacgtg

SEQ ID NO: 26712 - DNA, 20 bp, Artificial Sequence
  Chr1p_4  Forward Primer
caattccctggtgaccctta

SEQ ID NO: 26713 - DNA, 20 bp, Artificial Sequence
  Chr1p_4  Forward Primer
catcacatgagacactcggg

SEQ ID NO: 26714 - DNA, 20 bp, Artificial Sequence
  Chr1p_4  Forward Primer
ggaagtgccttgttgctttc

SEQ ID NO: 26715 - DNA, 20 bp, Artificial Sequence
  Chr1p_4  Forward Primer
atgcctaggacagagctgga

SEQ ID NO: 26716 - DNA, 20 bp, Artificial Sequence
  Chr1p_4  Forward Primer
ggagggacctttaaagcagg

SEQ ID NO: 26717 - DNA, 20 bp, Artificial Sequence
  Chr1p_4  Forward Primer
atggttttcatgggtgggta

SEQ ID NO: 26718 - DNA, 22 bp, Artificial Sequence
  Chr1p_4  Forward Primer
gatcataagggaaaagaagcca

SEQ ID NO: 26719 - DNA, 20 bp, Artificial Sequence
  Chr1p_4  Forward Primer
tggtaagttgtgatgctggg

SEQ ID NO: 26720 - DNA, 20 bp, Artificial Sequence
  Chr1p_4  Forward Primer
actggcctgtcgttatttgg

SEQ ID NO: 26721 - DNA, 20 bp, Artificial Sequence
  Chr1p_4  Forward Primer
aaggacagggacaggtcaga

SEQ ID NO: 26722 - DNA, 20 bp, Artificial Sequence
  Chr1p_4  Forward Primer
cacccctcattagttcaccg

SEQ ID NO: 26723 - DNA, 20 bp, Artificial Sequence
  Chr1p_4  Forward Primer
gtctcctttgctcaagtggg

SEQ ID NO: 26724 - DNA, 20 bp, Artificial Sequence
  Chr1p_4  Forward Primer
agcaggagcttggaagatga

SEQ ID NO: 26725 - DNA, 19 bp, Artificial Sequence
  Chr1p_4  Forward Primer
ctccccttctctcctgcct

SEQ ID NO: 26726 - DNA, 20 bp, Artificial Sequence
  Chr1p_4  Forward Primer
gaaattctgatggctcccaa

SEQ ID NO: 26727 - DNA, 21 bp, Artificial Sequence
  Chr1p_4  Forward Primer
cctgagctgaagtgttcctgt

SEQ ID NO: 26728 - DNA, 20 bp, Artificial Sequence
  Chr1p_4  Forward Primer
ctcgggaaatggaaacaatg

SEQ ID NO: 26729 - DNA, 20 bp, Artificial Sequence
  Chr1p_4  Forward Primer
tagaatccctgctttccagg

SEQ ID NO: 26730 - DNA, 20 bp, Artificial Sequence
  Chr1p_4  Forward Primer
atttccagagacagcccgta

SEQ ID NO: 26731 - DNA, 20 bp, Artificial Sequence
  Chr1p_4  Forward Primer
caggccgtggaaacttagac

SEQ ID NO: 26732 - DNA, 20 bp, Artificial Sequence
  Chr1p_4  Forward Primer
tgctaggcaagtgggagatt

SEQ ID NO: 26733 - DNA, 20 bp, Artificial Sequence
  Chr1p_4  Forward Primer
gcactgcatttctggttcct

SEQ ID NO: 26734 - DNA, 20 bp, Artificial Sequence
  Chr1p_4  Forward Primer
gttgtgctgtgctcaacagg

SEQ ID NO: 26735 - DNA, 20 bp, Artificial Sequence
  Chr1p_4  Forward Primer
tagccagagacagacacccc

SEQ ID NO: 26736 - DNA, 20 bp, Artificial Sequence
  Chr1p_4  Forward Primer
agtcaagcagggcaaaactc

SEQ ID NO: 26737 - DNA, 20 bp, Artificial Sequence
  Chr1p_4  Forward Primer
gagcttcggacaagatttgc

SEQ ID NO: 26738 - DNA, 20 bp, Artificial Sequence
  Chr1p_4  Forward Primer
tgctgttctatggaggaggg

SEQ ID NO: 26739 - DNA, 20 bp, Artificial Sequence
  Chr1p_4  Forward Primer
gcaaaagatcacctccctga

SEQ ID NO: 26740 - DNA, 20 bp, Artificial Sequence
  Chr1p_4  Forward Primer
tactgagtctccaatggggc

SEQ ID NO: 26741 - DNA, 20 bp, Artificial Sequence
  Chr1p_4  Forward Primer
gctgcaacaaaatgccagta

SEQ ID NO: 26742 - DNA, 20 bp, Artificial Sequence
  Chr1p_4  Forward Primer
tggcaagttctctcaggtca

SEQ ID NO: 26743 - DNA, 21 bp, Artificial Sequence
  Chr1p_4  Forward Primer
gctgggcagaatacatggtaa

SEQ ID NO: 26744 - DNA, 20 bp, Artificial Sequence
  Chr1p_4  Forward Primer
aaggctgaggacagaaagca

SEQ ID NO: 26745 - DNA, 20 bp, Artificial Sequence
  Chr1p_4  Forward Primer
ccccaagtcaacctcacatc

SEQ ID NO: 26746 - DNA, 20 bp, Artificial Sequence
  Chr1p_4  Forward Primer
gttttccccttaaagccctg

SEQ ID NO: 26747 - DNA, 20 bp, Artificial Sequence
  Chr1p_4  Forward Primer
ctctgtcctcccctctctcc

SEQ ID NO: 26748 - DNA, 20 bp, Artificial Sequence
  Chr1p_4  Forward Primer
agtccttccatgtccacacc

SEQ ID NO: 26749 - DNA, 20 bp, Artificial Sequence
  Chr1p_4  Forward Primer
cttgactttggctcctctgg

SEQ ID NO: 26750 - DNA, 20 bp, Artificial Sequence
  Chr1p_4  Forward Primer
gaaagggcacacactcacct

SEQ ID NO: 26751 - DNA, 20 bp, Artificial Sequence
  Chr1p_4  Forward Primer
cctcaaggagctcacagtcc

SEQ ID NO: 26752 - DNA, 20 bp, Artificial Sequence
  Chr1p_4  Forward Primer
agaggctggaagagtcacca

SEQ ID NO: 26753 - DNA, 20 bp, Artificial Sequence
  Chr1p_4  Reverse Primer
gcaggtcctcatacctctgc

SEQ ID NO: 26754 - DNA, 20 bp, Artificial Sequence
  Chr1p_4  Reverse Primer
gaaggaagcatcccagtgaa

SEQ ID NO: 26755 - DNA, 20 bp, Artificial Sequence
  Chr1p_4  Reverse Primer
actcttgccagcttttgtcg

SEQ ID NO: 26756 - DNA, 20 bp, Artificial Sequence
  Chr1p_4  Reverse Primer
taaggcagaaggccacagtt

SEQ ID NO: 26757 - DNA, 20 bp, Artificial Sequence
  Chr1p_4  Reverse Primer
agggagccttaaggatggaa

SEQ ID NO: 26758 - DNA, 20 bp, Artificial Sequence
  Chr1p_4  Reverse Primer
atgggcaggacagagctaga

SEQ ID NO: 26759 - DNA, 20 bp, Artificial Sequence
  Chr1p_4  Reverse Primer
agagtaggaggacggtgcaa

SEQ ID NO: 26760 - DNA, 20 bp, Artificial Sequence
  Chr1p_4  Reverse Primer
attgaccagggaggactgtg

SEQ ID NO: 26761 - DNA, 20 bp, Artificial Sequence
  Chr1p_4  Reverse Primer
tccaggtctgctttgattcc

SEQ ID NO: 26762 - DNA, 20 bp, Artificial Sequence
  Chr1p_4  Reverse Primer
gcctaccatggggagaaact

SEQ ID NO: 26763 - DNA, 20 bp, Artificial Sequence
  Chr1p_4  Reverse Primer
cttgcccacttgcattcttt

SEQ ID NO: 26764 - DNA, 20 bp, Artificial Sequence
  Chr1p_4  Reverse Primer
ctggtctctggcaccttagc

SEQ ID NO: 26765 - DNA, 19 bp, Artificial Sequence
  Chr1p_4  Reverse Primer
gactctgcaggtcattggc

SEQ ID NO: 26766 - DNA, 20 bp, Artificial Sequence
  Chr1p_4  Reverse Primer
gttagagactgcgtttgccc

SEQ ID NO: 26767 - DNA, 20 bp, Artificial Sequence
  Chr1p_4  Reverse Primer
tgctctaatgcacaaatgcc

SEQ ID NO: 26768 - DNA, 20 bp, Artificial Sequence
  Chr1p_4  Reverse Primer
agaaagcccaggctctcagt

SEQ ID NO: 26769 - DNA, 20 bp, Artificial Sequence
  Chr1p_4  Reverse Primer
tgcagaacagtccagtgagg

SEQ ID NO: 26770 - DNA, 20 bp, Artificial Sequence
  Chr1p_4  Reverse Primer
tctcctttataccccacccc

SEQ ID NO: 26771 - DNA, 20 bp, Artificial Sequence
  Chr1p_4  Reverse Primer
ctcttcctccagctcacagc

SEQ ID NO: 26772 - DNA, 20 bp, Artificial Sequence
  Chr1p_4  Reverse Primer
ggggatgtttcctaggtggt

SEQ ID NO: 26773 - DNA, 20 bp, Artificial Sequence
  Chr1p_4  Reverse Primer
ctctgaaaatgcgtgctgaa

SEQ ID NO: 26774 - DNA, 20 bp, Artificial Sequence
  Chr1p_4  Reverse Primer
cgagtgtatagagggcctgc

SEQ ID NO: 26775 - DNA, 20 bp, Artificial Sequence
  Chr1p_4  Reverse Primer
gcataaagccccaacaaaac

SEQ ID NO: 26776 - DNA, 20 bp, Artificial Sequence
  Chr1p_4  Reverse Primer
gtgcaaaagctagaaacccg

SEQ ID NO: 26777 - DNA, 20 bp, Artificial Sequence
  Chr1p_4  Reverse Primer
cctgccttcacaatcctgtt

SEQ ID NO: 26778 - DNA, 22 bp, Artificial Sequence
  Chr1p_4  Reverse Primer
tctctgccccttaattttctca

SEQ ID NO: 26779 - DNA, 20 bp, Artificial Sequence
  Chr1p_4  Reverse Primer
ctgatttctgggcttgaagg

SEQ ID NO: 26780 - DNA, 20 bp, Artificial Sequence
  Chr1p_4  Reverse Primer
aagcttcacaggggtcttga

SEQ ID NO: 26781 - DNA, 20 bp, Artificial Sequence
  Chr1p_4  Reverse Primer
ttgaagtctggggatggttc

SEQ ID NO: 26782 - DNA, 20 bp, Artificial Sequence
  Chr1p_4  Reverse Primer
ggataccggttttgacgcta

SEQ ID NO: 26783 - DNA, 25 bp, Artificial Sequence
  Chr1p_4  Reverse Primer
cagcctagtattttggaggaacttt

SEQ ID NO: 26784 - DNA, 20 bp, Artificial Sequence
  Chr1p_4  Reverse Primer
tgcagattgaagaggcaatg

SEQ ID NO: 26785 - DNA, 20 bp, Artificial Sequence
  Chr1p_4  Reverse Primer
tcctaccatacccttgtccg

SEQ ID NO: 26786 - DNA, 20 bp, Artificial Sequence
  Chr1p_4  Reverse Primer
acccctggacaaactaaggg

SEQ ID NO: 26787 - DNA, 20 bp, Artificial Sequence
  Chr1p_4  Reverse Primer
ccggctttcttttcagatgt

SEQ ID NO: 26788 - DNA, 20 bp, Artificial Sequence
  Chr1p_4  Reverse Primer
aggagcaaacccaaagaggt

SEQ ID NO: 26789 - DNA, 20 bp, Artificial Sequence
  Chr1p_4  Reverse Primer
gggtcctcaaaatagagccc

SEQ ID NO: 26790 - DNA, 22 bp, Artificial Sequence
  Chr1p_4  Reverse Primer
tgggtgatagtagggtgttgaa

SEQ ID NO: 26791 - DNA, 20 bp, Artificial Sequence
  Chr1p_4  Reverse Primer
ccacaagtgagctggtttga

SEQ ID NO: 26792 - DNA, 20 bp, Artificial Sequence
  Chr1p_4  Reverse Primer
gtcgctcactcgaggatttg

SEQ ID NO: 26793 - DNA, 19 bp, Artificial Sequence
  Chr1p_4  Reverse Primer
taccggcaggtgagtgtgt

SEQ ID NO: 26794 - DNA, 20 bp, Artificial Sequence
  Chr1p_4  Reverse Primer
cggaagctccatcaatcact

SEQ ID NO: 26795 - DNA, 20 bp, Artificial Sequence
  Chr1p_4  Reverse Primer
ctctccctaccgggaagagt

SEQ ID NO: 26796 - DNA, 20 bp, Artificial Sequence
  Chr1p_4  Reverse Primer
tgctgagatcactcggtcac

SEQ ID NO: 26797 - DNA, 20 bp, Artificial Sequence
  Chr1p_4  Reverse Primer
tgtaggctgtgtagtgggca

SEQ ID NO: 26798 - DNA, 20 bp, Artificial Sequence
  Chr1p_4  Reverse Primer
gagcaaatggagatgaggga

SEQ ID NO: 26799 - DNA, 20 bp, Artificial Sequence
  Chr1p_4  Reverse Primer
ggctggagatgctggtatgt

SEQ ID NO: 26800 - DNA, 20 bp, Artificial Sequence
  Chr1p_4  Reverse Primer
cgtctggcacctagtaagca

SEQ ID NO: 26801 - DNA, 20 bp, Artificial Sequence
  Chr1p_4  Reverse Primer
ggaatgggggcaaataattc

SEQ ID NO: 26802 - DNA, 20 bp, Artificial Sequence
  Chr1p_4  Reverse Primer
aggaacttctccacccacct

SEQ ID NO: 26803 - DNA, 20 bp, Artificial Sequence
  Chr1p_4  Reverse Primer
atcccataatggaaggggag

SEQ ID NO: 26804 - DNA, 20 bp, Artificial Sequence
  Chr1p_4  Reverse Primer
agtgtgaaggatgggactgg

SEQ ID NO: 26805 - DNA, 20 bp, Artificial Sequence
  Chr1p_4  Reverse Primer
tggggaacctaaccatgtct

SEQ ID NO: 26806 - DNA, 20 bp, Artificial Sequence
  Chr1p_4  Reverse Primer
caggcagcacacagatcatt

SEQ ID NO: 26807 - DNA, 20 bp, Artificial Sequence
  Chr1p_4  Reverse Primer
ccggagtttgaaattgctgt

SEQ ID NO: 26808 - DNA, 20 bp, Artificial Sequence
  Chr1p_4  Reverse Primer
gaaggccagcttcctctttc

SEQ ID NO: 26809 - DNA, 20 bp, Artificial Sequence
  Chr1p_4  Reverse Primer
aaccggctgtcaaatctctg

SEQ ID NO: 26810 - DNA, 20 bp, Artificial Sequence
  Chr1p_4  Reverse Primer
acggtcctcaaagtccactg

SEQ ID NO: 26811 - DNA, 20 bp, Artificial Sequence
  Chr1p_4  Reverse Primer
cactctttgcccatccactt

SEQ ID NO: 26812 - DNA, 20 bp, Artificial Sequence
  Chr1p_4  Reverse Primer
tatttccctccttgcctgtg

SEQ ID NO: 26813 - DNA, 20 bp, Artificial Sequence
  Chr1p_4  Reverse Primer
tctgattttccctctgtggc

SEQ ID NO: 26814 - DNA, 21 bp, Artificial Sequence
  Chr1p_4  Reverse Primer
tcaggaaattgtgcagattca

SEQ ID NO: 26815 - DNA, 20 bp, Artificial Sequence
  Chr1p_4  Reverse Primer
tgggctagcatgatgcagta

SEQ ID NO: 26816 - DNA, 20 bp, Artificial Sequence
  Chr1p_4  Reverse Primer
tcttttgttccaggattgcc

SEQ ID NO: 26817 - DNA, 21 bp, Artificial Sequence
  Chr1p_4  Reverse Primer
cagatctgtgctttggaagga

SEQ ID NO: 26818 - DNA, 20 bp, Artificial Sequence
  Chr1p_4  Reverse Primer
cactgtaagatggctggggt

SEQ ID NO: 26819 - DNA, 20 bp, Artificial Sequence
  Chr1p_4  Reverse Primer
tgcccttccttgtgacttct

SEQ ID NO: 26820 - DNA, 19 bp, Artificial Sequence
  Chr1p_4  Reverse Primer
acctggcaagagtggttcc

SEQ ID NO: 26821 - DNA, 20 bp, Artificial Sequence
  Chr1p_4  Reverse Primer
ctagaaggaccactctgggg

SEQ ID NO: 26822 - DNA, 20 bp, Artificial Sequence
  Chr1p_4  Reverse Primer
gagagagatgaggggaaggg

SEQ ID NO: 26823 - DNA, 20 bp, Artificial Sequence
  Chr1p_4  Reverse Primer
ctcacattccaggcccttgt

SEQ ID NO: 26824 - DNA, 20 bp, Artificial Sequence
  Chr1p_4  Reverse Primer
gaagcccagctgcaagttac

SEQ ID NO: 26825 - DNA, 20 bp, Artificial Sequence
  Chr1p_4  Reverse Primer
catgccccagaggacattat

SEQ ID NO: 26826 - DNA, 20 bp, Artificial Sequence
  Chr1p_4  Reverse Primer
tgaggcatctgacaccaaac

SEQ ID NO: 26827 - DNA, 21 bp, Artificial Sequence
  Chr1p_4  Reverse Primer
ctcaggctgttcatgtgttca

SEQ ID NO: 26828 - DNA, 20 bp, Artificial Sequence
  Chr1p_4  Reverse Primer
gctttccatcaacgcagact

SEQ ID NO: 26829 - DNA, 20 bp, Artificial Sequence
  Chr1p_4  Reverse Primer
gcctgaggatcatgctgaat

SEQ ID NO: 26830 - DNA, 20 bp, Artificial Sequence
  Chr1p_4  Reverse Primer
agtccactttgcctgctttc

SEQ ID NO: 26831 - DNA, 20 bp, Artificial Sequence
  Chr1p_4  Reverse Primer
ctccattcagaggaagctgg

SEQ ID NO: 26832 - DNA, 20 bp, Artificial Sequence
  Chr1p_4  Reverse Primer
agaggaaatggagctgctga

SEQ ID NO: 26833 - DNA, 20 bp, Artificial Sequence
  Chr1p_4  Reverse Primer
agcaagggtctcagtagcca

SEQ ID NO: 26834 - DNA, 20 bp, Artificial Sequence
  Chr1p_4  Reverse Primer
agagctagggaagggcattt

SEQ ID NO: 26835 - DNA, 20 bp, Artificial Sequence
  Chr1p_4  Reverse Primer
gcctctctcttccgtgtgtc

SEQ ID NO: 26836 - DNA, 20 bp, Artificial Sequence
  Chr1p_4  Reverse Primer
aggaggctttcggaaatgtt

SEQ ID NO: 26837 - DNA, 20 bp, Artificial Sequence
  Chr1p_4  Reverse Primer
gacttgggcaactgggtaaa

SEQ ID NO: 26838 - DNA, 20 bp, Artificial Sequence
  Chr1p_4  Reverse Primer
catggtgcaagcaagtcagt

SEQ ID NO: 26839 - DNA, 21 bp, Artificial Sequence
  Chr1p_4  Reverse Primer
cgtcttgaactttctccctcc

SEQ ID NO: 26840 - DNA, 20 bp, Artificial Sequence
  Chr1p_4  Reverse Primer
ctggtaagctccagctgctc

SEQ ID NO: 26841 - DNA, 20 bp, Artificial Sequence
  Chr1p_4  Reverse Primer
tctctgctctcctgaaggct

SEQ ID NO: 26842 - DNA, 20 bp, Artificial Sequence
  Chr1p_4  Reverse Primer
caggaaggagttggaagctg

SEQ ID NO: 26843 - DNA, 20 bp, Artificial Sequence
  Chr1p_4  Reverse Primer
gttttgctggggaatctgaa

SEQ ID NO: 26844 - DNA, 20 bp, Artificial Sequence
  Chr1p_4  Reverse Primer
ggtctgtctccctctacccc

SEQ ID NO: 26845 - DNA, 20 bp, Artificial Sequence
  Chr1p_4  Reverse Primer
tggagagaattgaggggttg

SEQ ID NO: 26846 - DNA, 20 bp, Artificial Sequence
  Chr1p_4  Reverse Primer
gaagccagctgtcctgtttc

SEQ ID NO: 26847 - DNA, 20 bp, Artificial Sequence
  Chr1p_4  Reverse Primer
cacttttctcctccacctgc

SEQ ID NO: 26848 - DNA, 20 bp, Artificial Sequence
  Chr1p_4  Reverse Primer
atacaagcggagattccctg

SEQ ID NO: 26849 - DNA, 20 bp, Artificial Sequence
  Chr1p_5  Forward Primer
ggcaaagcaatggaaaatgt

SEQ ID NO: 26850 - DNA, 20 bp, Artificial Sequence
  Chr1p_5  Forward Primer
aggaaaatgatttccacccc

SEQ ID NO: 26851 - DNA, 20 bp, Artificial Sequence
  Chr1p_5  Forward Primer
tgcctcagcaagacaagatg

SEQ ID NO: 26852 - DNA, 20 bp, Artificial Sequence
  Chr1p_5  Forward Primer
acccaggaacctaaggctgt

SEQ ID NO: 26853 - DNA, 20 bp, Artificial Sequence
  Chr1p_5  Forward Primer
tcagaggaaatccagaaggc

SEQ ID NO: 26854 - DNA, 20 bp, Artificial Sequence
  Chr1p_5  Forward Primer
ttcttctcatcaatgcccct

SEQ ID NO: 26855 - DNA, 20 bp, Artificial Sequence
  Chr1p_5  Forward Primer
agtcaccagtcacctgcaca

SEQ ID NO: 26856 - DNA, 21 bp, Artificial Sequence
  Chr1p_5  Forward Primer
ttggcccatagcactaaattg

SEQ ID NO: 26857 - DNA, 20 bp, Artificial Sequence
  Chr1p_5  Forward Primer
aggcttctctctcagcctcc

SEQ ID NO: 26858 - DNA, 20 bp, Artificial Sequence
  Chr1p_5  Forward Primer
cagtgtgggctcatgtgatg

SEQ ID NO: 26859 - DNA, 20 bp, Artificial Sequence
  Chr1p_5  Forward Primer
aaggaagagtccttggctcc

SEQ ID NO: 26860 - DNA, 20 bp, Artificial Sequence
  Chr1p_5  Forward Primer
ccctcctgtggtatgtggtt

SEQ ID NO: 26861 - DNA, 20 bp, Artificial Sequence
  Chr1p_5  Forward Primer
gcactgtcacaaaaacgtgc

SEQ ID NO: 26862 - DNA, 20 bp, Artificial Sequence
  Chr1p_5  Forward Primer
gttcactgatgtgcaggtgg

SEQ ID NO: 26863 - DNA, 20 bp, Artificial Sequence
  Chr1p_5  Forward Primer
tgagagaagccaggaggaaa

SEQ ID NO: 26864 - DNA, 19 bp, Artificial Sequence
  Chr1p_5  Forward Primer
gaggtgcagcagctgagtc

SEQ ID NO: 26865 - DNA, 20 bp, Artificial Sequence
  Chr1p_5  Forward Primer
gggtgagagagccatcacat

SEQ ID NO: 26866 - DNA, 20 bp, Artificial Sequence
  Chr1p_5  Forward Primer
tattggcttttgaaggctgg

SEQ ID NO: 26867 - DNA, 20 bp, Artificial Sequence
  Chr1p_5  Forward Primer
agcagtggcagagggagtaa

SEQ ID NO: 26868 - DNA, 20 bp, Artificial Sequence
  Chr1p_5  Forward Primer
aatgctcaaggcaagaggaa

SEQ ID NO: 26869 - DNA, 20 bp, Artificial Sequence
  Chr1p_5  Forward Primer
ttctgacacagagcacccaa

SEQ ID NO: 26870 - DNA, 22 bp, Artificial Sequence
  Chr1p_5  Forward Primer
ttcttcttcctctctcagcctc

SEQ ID NO: 26871 - DNA, 20 bp, Artificial Sequence
  Chr1p_5  Forward Primer
taaggctggtggaatggaag

SEQ ID NO: 26872 - DNA, 20 bp, Artificial Sequence
  Chr1p_5  Forward Primer
tccatacgtgctcaaattgc

SEQ ID NO: 26873 - DNA, 20 bp, Artificial Sequence
  Chr1p_5  Forward Primer
ggaggtggagagggagtagg

SEQ ID NO: 26874 - DNA, 20 bp, Artificial Sequence
  Chr1p_5  Forward Primer
aagaaggaagagggccagtc

SEQ ID NO: 26875 - DNA, 20 bp, Artificial Sequence
  Chr1p_5  Forward Primer
ggtcagtgccaccagaagat

SEQ ID NO: 26876 - DNA, 20 bp, Artificial Sequence
  Chr1p_5  Forward Primer
agggacacagacacaggacc

SEQ ID NO: 26877 - DNA, 20 bp, Artificial Sequence
  Chr1p_5  Forward Primer
gtctggacatttgctgggat

SEQ ID NO: 26878 - DNA, 19 bp, Artificial Sequence
  Chr1p_5  Forward Primer
agagcccttgccaactgag

SEQ ID NO: 26879 - DNA, 20 bp, Artificial Sequence
  Chr1p_5  Forward Primer
ggaaaccagtgaagggaggt

SEQ ID NO: 26880 - DNA, 20 bp, Artificial Sequence
  Chr1p_5  Forward Primer
cagctggaaccctgtctctt

SEQ ID NO: 26881 - DNA, 20 bp, Artificial Sequence
  Chr1p_5  Forward Primer
gagacaggcacagagaggct

SEQ ID NO: 26882 - DNA, 20 bp, Artificial Sequence
  Chr1p_5  Forward Primer
agggagtctgagttccagca

SEQ ID NO: 26883 - DNA, 20 bp, Artificial Sequence
  Chr1p_5  Forward Primer
ctcccacaggcaaacagact

SEQ ID NO: 26884 - DNA, 20 bp, Artificial Sequence
  Chr1p_5  Forward Primer
cccaaggaggaaaaaggaaa

SEQ ID NO: 26885 - DNA, 20 bp, Artificial Sequence
  Chr1p_5  Forward Primer
tggactgcatcatgagatgg

SEQ ID NO: 26886 - DNA, 20 bp, Artificial Sequence
  Chr1p_5  Forward Primer
gggagtggccacagctagta

SEQ ID NO: 26887 - DNA, 21 bp, Artificial Sequence
  Chr1p_5  Forward Primer
tttggtcagagcttctggtct

SEQ ID NO: 26888 - DNA, 20 bp, Artificial Sequence
  Chr1p_5  Forward Primer
caccatgaggctgctcagta

SEQ ID NO: 26889 - DNA, 21 bp, Artificial Sequence
  Chr1p_5  Forward Primer
tcccagaaaaggaagaaggaa

SEQ ID NO: 26890 - DNA, 20 bp, Artificial Sequence
  Chr1p_5  Forward Primer
atggcagagcaggatcactt

SEQ ID NO: 26891 - DNA, 20 bp, Artificial Sequence
  Chr1p_5  Forward Primer
ctgtggccatggtgtatgtc

SEQ ID NO: 26892 - DNA, 20 bp, Artificial Sequence
  Chr1p_5  Forward Primer
aggaggggagatcaggttgt

SEQ ID NO: 26893 - DNA, 20 bp, Artificial Sequence
  Chr1p_5  Forward Primer
gcctcctcctccttcactct

SEQ ID NO: 26894 - DNA, 20 bp, Artificial Sequence
  Chr1p_5  Forward Primer
ccacatacagtcgtcccctt

SEQ ID NO: 26895 - DNA, 20 bp, Artificial Sequence
  Chr1p_5  Forward Primer
atcaccagggagctgaagtg

SEQ ID NO: 26896 - DNA, 20 bp, Artificial Sequence
  Chr1p_5  Forward Primer
acgagatgctggaaggagaa

SEQ ID NO: 26897 - DNA, 20 bp, Artificial Sequence
  Chr1p_5  Forward Primer
gatgagggctgtggttcttc

SEQ ID NO: 26898 - DNA, 20 bp, Artificial Sequence
  Chr1p_5  Forward Primer
gacagtcaacatgtgggtgc

SEQ ID NO: 26899 - DNA, 18 bp, Artificial Sequence
  Chr1p_5  Forward Primer
tgggtggcagcttctcag

SEQ ID NO: 26900 - DNA, 20 bp, Artificial Sequence
  Chr1p_5  Forward Primer
gaggtttgtcttccccttcc

SEQ ID NO: 26901 - DNA, 20 bp, Artificial Sequence
  Chr1p_5  Forward Primer
ggctgccaaactgacttttt

SEQ ID NO: 26902 - DNA, 20 bp, Artificial Sequence
  Chr1p_5  Forward Primer
tggtaagctcgctttccttg

SEQ ID NO: 26903 - DNA, 20 bp, Artificial Sequence
  Chr1p_5  Forward Primer
tcagcagtgattgttcaggc

SEQ ID NO: 26904 - DNA, 20 bp, Artificial Sequence
  Chr1p_5  Forward Primer
ctgtcctattcgcccacact

SEQ ID NO: 26905 - DNA, 20 bp, Artificial Sequence
  Chr1p_5  Forward Primer
gatgagggttccacaaatgg

SEQ ID NO: 26906 - DNA, 20 bp, Artificial Sequence
  Chr1p_5  Forward Primer
gggcttcctctccttcttgt

SEQ ID NO: 26907 - DNA, 20 bp, Artificial Sequence
  Chr1p_5  Forward Primer
ctgtgagatgtggacggatg

SEQ ID NO: 26908 - DNA, 20 bp, Artificial Sequence
  Chr1p_5  Forward Primer
gggacttccctcagccttct

SEQ ID NO: 26909 - DNA, 20 bp, Artificial Sequence
  Chr1p_5  Forward Primer
agggcccacgctattctatt

SEQ ID NO: 26910 - DNA, 20 bp, Artificial Sequence
  Chr1p_5  Forward Primer
ggtggctcttctccccttta

SEQ ID NO: 26911 - DNA, 20 bp, Artificial Sequence
  Chr1p_5  Forward Primer
tcagtgttgggtgacctgaa

SEQ ID NO: 26912 - DNA, 20 bp, Artificial Sequence
  Chr1p_5  Forward Primer
tccacaagggacatcattca

SEQ ID NO: 26913 - DNA, 20 bp, Artificial Sequence
  Chr1p_5  Forward Primer
ctcacccaaccacctgactt

SEQ ID NO: 26914 - DNA, 20 bp, Artificial Sequence
  Chr1p_5  Forward Primer
tttggaggagcaggtgattt

SEQ ID NO: 26915 - DNA, 20 bp, Artificial Sequence
  Chr1p_5  Forward Primer
agccaaggagaaaagggaga

SEQ ID NO: 26916 - DNA, 20 bp, Artificial Sequence
  Chr1p_5  Forward Primer
tcaaaggcctcctgtgactt

SEQ ID NO: 26917 - DNA, 20 bp, Artificial Sequence
  Chr1p_5  Forward Primer
agtgccaactgtctctgggt

SEQ ID NO: 26918 - DNA, 20 bp, Artificial Sequence
  Chr1p_5  Forward Primer
gcccctagtcctatggaagc

SEQ ID NO: 26919 - DNA, 20 bp, Artificial Sequence
  Chr1p_5  Forward Primer
acatggtttgcagcacagag

SEQ ID NO: 26920 - DNA, 20 bp, Artificial Sequence
  Chr1p_5  Forward Primer
atgatcaatctgagtggggg

SEQ ID NO: 26921 - DNA, 20 bp, Artificial Sequence
  Chr1p_5  Forward Primer
acttctgagtggggagcaaa

SEQ ID NO: 26922 - DNA, 20 bp, Artificial Sequence
  Chr1p_5  Forward Primer
ccgaaggaccgttctaatga

SEQ ID NO: 26923 - DNA, 19 bp, Artificial Sequence
  Chr1p_5  Forward Primer
gtcacagaatgggccatga

SEQ ID NO: 26924 - DNA, 20 bp, Artificial Sequence
  Chr1p_5  Forward Primer
ccttctgtatcgaaggcgtc

SEQ ID NO: 26925 - DNA, 20 bp, Artificial Sequence
  Chr1p_5  Forward Primer
aggctggtggggcttaatac

SEQ ID NO: 26926 - DNA, 21 bp, Artificial Sequence
  Chr1p_5  Forward Primer
ccagtgccccttctaaaaatc

SEQ ID NO: 26927 - DNA, 20 bp, Artificial Sequence
  Chr1p_5  Forward Primer
cagaaggaaaagtgcttgcc

SEQ ID NO: 26928 - DNA, 20 bp, Artificial Sequence
  Chr1p_5  Forward Primer
taactcatccaggggattgg

SEQ ID NO: 26929 - DNA, 18 bp, Artificial Sequence
  Chr1p_5  Forward Primer
agctgaaccctggctcct

SEQ ID NO: 26930 - DNA, 20 bp, Artificial Sequence
  Chr1p_5  Forward Primer
gtcatggctgtgtggaaaga

SEQ ID NO: 26931 - DNA, 20 bp, Artificial Sequence
  Chr1p_5  Forward Primer
gttcttgagttgggcagagc

SEQ ID NO: 26932 - DNA, 20 bp, Artificial Sequence
  Chr1p_5  Forward Primer
attgagactttgcagcctcc

SEQ ID NO: 26933 - DNA, 20 bp, Artificial Sequence
  Chr1p_5  Forward Primer
tctgagtcctccgatctgct

SEQ ID NO: 26934 - DNA, 20 bp, Artificial Sequence
  Chr1p_5  Forward Primer
ctagtttgctcaggctggct

SEQ ID NO: 26935 - DNA, 20 bp, Artificial Sequence
  Chr1p_5  Forward Primer
ccttttctgcagatgcttgg

SEQ ID NO: 26936 - DNA, 20 bp, Artificial Sequence
  Chr1p_5  Forward Primer
tccccaaatctggttgtttc

SEQ ID NO: 26937 - DNA, 20 bp, Artificial Sequence
  Chr1p_5  Forward Primer
gcagcagcactgtattccat

SEQ ID NO: 26938 - DNA, 22 bp, Artificial Sequence
  Chr1p_5  Forward Primer
gagaggcttagcatttttgcat

SEQ ID NO: 26939 - DNA, 20 bp, Artificial Sequence
  Chr1p_5  Forward Primer
attgtcaccttggctccatc

SEQ ID NO: 26940 - DNA, 20 bp, Artificial Sequence
  Chr1p_5  Forward Primer
tctactggcatttggggaag

SEQ ID NO: 26941 - DNA, 20 bp, Artificial Sequence
  Chr1p_5  Forward Primer
ccacaggaaatgtttcaggg

SEQ ID NO: 26942 - DNA, 20 bp, Artificial Sequence
  Chr1p_5  Forward Primer
ttcatggaaaacaggcacaa

SEQ ID NO: 26943 - DNA, 20 bp, Artificial Sequence
  Chr1p_5  Forward Primer
ccctttttatagatgggggc

SEQ ID NO: 26944 - DNA, 20 bp, Artificial Sequence
  Chr1p_5  Forward Primer
ttttcactgtctgggaggct

SEQ ID NO: 26945 - DNA, 20 bp, Artificial Sequence
  Chr1p_5  Reverse Primer
cagtgatgggtcttggtgtg

SEQ ID NO: 26946 - DNA, 20 bp, Artificial Sequence
  Chr1p_5  Reverse Primer
ccagaaccttgggtcttcct

SEQ ID NO: 26947 - DNA, 20 bp, Artificial Sequence
  Chr1p_5  Reverse Primer
ttcacagccaagccataaag

SEQ ID NO: 26948 - DNA, 20 bp, Artificial Sequence
  Chr1p_5  Reverse Primer
tgtgaaacccaagtcatgga

SEQ ID NO: 26949 - DNA, 20 bp, Artificial Sequence
  Chr1p_5  Reverse Primer
tttcactattccaggccacc

SEQ ID NO: 26950 - DNA, 20 bp, Artificial Sequence
  Chr1p_5  Reverse Primer
agagactggctgtggaggaa

SEQ ID NO: 26951 - DNA, 20 bp, Artificial Sequence
  Chr1p_5  Reverse Primer
tcccaggataccagcatttc

SEQ ID NO: 26952 - DNA, 20 bp, Artificial Sequence
  Chr1p_5  Reverse Primer
tggaggagggaagtgaaaaa

SEQ ID NO: 26953 - DNA, 20 bp, Artificial Sequence
  Chr1p_5  Reverse Primer
tacctccaaatcctgttgcc

SEQ ID NO: 26954 - DNA, 20 bp, Artificial Sequence
  Chr1p_5  Reverse Primer
gttctcagctctgggtgagg

SEQ ID NO: 26955 - DNA, 20 bp, Artificial Sequence
  Chr1p_5  Reverse Primer
gtccctgaactctgcagctc

SEQ ID NO: 26956 - DNA, 20 bp, Artificial Sequence
  Chr1p_5  Reverse Primer
ctgctgtgcctagtcccatt

SEQ ID NO: 26957 - DNA, 20 bp, Artificial Sequence
  Chr1p_5  Reverse Primer
tgcagaactgtgtctcaggc

SEQ ID NO: 26958 - DNA, 20 bp, Artificial Sequence
  Chr1p_5  Reverse Primer
catcgcctgatctctgaaca

SEQ ID NO: 26959 - DNA, 20 bp, Artificial Sequence
  Chr1p_5  Reverse Primer
ccacctcacctaccccagta

SEQ ID NO: 26960 - DNA, 20 bp, Artificial Sequence
  Chr1p_5  Reverse Primer
ttattgcaaggaaagctggg

SEQ ID NO: 26961 - DNA, 20 bp, Artificial Sequence
  Chr1p_5  Reverse Primer
ccatttctgtctcctcccaa

SEQ ID NO: 26962 - DNA, 20 bp, Artificial Sequence
  Chr1p_5  Reverse Primer
ggtgccactgagcatcacta

SEQ ID NO: 26963 - DNA, 20 bp, Artificial Sequence
  Chr1p_5  Reverse Primer
ttagcatgtgcaaaccaagc

SEQ ID NO: 26964 - DNA, 20 bp, Artificial Sequence
  Chr1p_5  Reverse Primer
agctcacagcaaaggaagga

SEQ ID NO: 26965 - DNA, 20 bp, Artificial Sequence
  Chr1p_5  Reverse Primer
tgtttttgacgtgcatccat

SEQ ID NO: 26966 - DNA, 20 bp, Artificial Sequence
  Chr1p_5  Reverse Primer
agagtgcccacacccagaat

SEQ ID NO: 26967 - DNA, 20 bp, Artificial Sequence
  Chr1p_5  Reverse Primer
agcctggctatctcaagctg

SEQ ID NO: 26968 - DNA, 20 bp, Artificial Sequence
  Chr1p_5  Reverse Primer
tgtgggattttcagaggacc

SEQ ID NO: 26969 - DNA, 20 bp, Artificial Sequence
  Chr1p_5  Reverse Primer
gttcgcatcttccctgagag

SEQ ID NO: 26970 - DNA, 20 bp, Artificial Sequence
  Chr1p_5  Reverse Primer
caatagcagctgcgttgaaa

SEQ ID NO: 26971 - DNA, 20 bp, Artificial Sequence
  Chr1p_5  Reverse Primer
cgtagaggaaaatgcgcttc

SEQ ID NO: 26972 - DNA, 20 bp, Artificial Sequence
  Chr1p_5  Reverse Primer
atgcttgactttgggaaacg

SEQ ID NO: 26973 - DNA, 20 bp, Artificial Sequence
  Chr1p_5  Reverse Primer
tgcctttcagcagacatcac

SEQ ID NO: 26974 - DNA, 23 bp, Artificial Sequence
  Chr1p_5  Reverse Primer
gctagagtggagaaggaagaaga

SEQ ID NO: 26975 - DNA, 20 bp, Artificial Sequence
  Chr1p_5  Reverse Primer
aagggaattctctctgggga

SEQ ID NO: 26976 - DNA, 20 bp, Artificial Sequence
  Chr1p_5  Reverse Primer
atctccaaaggcagagtgga

SEQ ID NO: 26977 - DNA, 20 bp, Artificial Sequence
  Chr1p_5  Reverse Primer
ctgctccctaggcaaaagtg

SEQ ID NO: 26978 - DNA, 20 bp, Artificial Sequence
  Chr1p_5  Reverse Primer
agattcttgctcggtttcca

SEQ ID NO: 26979 - DNA, 20 bp, Artificial Sequence
  Chr1p_5  Reverse Primer
gccacactggcactcagtaa

SEQ ID NO: 26980 - DNA, 20 bp, Artificial Sequence
  Chr1p_5  Reverse Primer
gcggcttccattctctgtta

SEQ ID NO: 26981 - DNA, 20 bp, Artificial Sequence
  Chr1p_5  Reverse Primer
agtgctcctaaaacctgcga

SEQ ID NO: 26982 - DNA, 21 bp, Artificial Sequence
  Chr1p_5  Reverse Primer
ttccccttttgtcattcagtg

SEQ ID NO: 26983 - DNA, 20 bp, Artificial Sequence
  Chr1p_5  Reverse Primer
gcttagggaactgagggtca

SEQ ID NO: 26984 - DNA, 20 bp, Artificial Sequence
  Chr1p_5  Reverse Primer
acgctttcattgcctttgat

SEQ ID NO: 26985 - DNA, 21 bp, Artificial Sequence
  Chr1p_5  Reverse Primer
tggaaaacttggctaacagga

SEQ ID NO: 26986 - DNA, 20 bp, Artificial Sequence
  Chr1p_5  Reverse Primer
aagcacttggcgagctttta

SEQ ID NO: 26987 - DNA, 20 bp, Artificial Sequence
  Chr1p_5  Reverse Primer
cagcctccacacaaccacta

SEQ ID NO: 26988 - DNA, 20 bp, Artificial Sequence
  Chr1p_5  Reverse Primer
ggcaggagggagctagaaat

SEQ ID NO: 26989 - DNA, 20 bp, Artificial Sequence
  Chr1p_5  Reverse Primer
caaagcagagctttcccaac

SEQ ID NO: 26990 - DNA, 20 bp, Artificial Sequence
  Chr1p_5  Reverse Primer
gcacctacatcagctcctcc

SEQ ID NO: 26991 - DNA, 20 bp, Artificial Sequence
  Chr1p_5  Reverse Primer
tccctccttatttcaagccc

SEQ ID NO: 26992 - DNA, 20 bp, Artificial Sequence
  Chr1p_5  Reverse Primer
ttgtcccagatttcctctgc

SEQ ID NO: 26993 - DNA, 20 bp, Artificial Sequence
  Chr1p_5  Reverse Primer
agacacgcagcaaatccttt

SEQ ID NO: 26994 - DNA, 20 bp, Artificial Sequence
  Chr1p_5  Reverse Primer
agagatggcccaatcatcag

SEQ ID NO: 26995 - DNA, 19 bp, Artificial Sequence
  Chr1p_5  Reverse Primer
gacgctctgctcactccct

SEQ ID NO: 26996 - DNA, 20 bp, Artificial Sequence
  Chr1p_5  Reverse Primer
caagtcaccagcagaaccaa

SEQ ID NO: 26997 - DNA, 20 bp, Artificial Sequence
  Chr1p_5  Reverse Primer
tcagagcttcagatcgcaaa

SEQ ID NO: 26998 - DNA, 20 bp, Artificial Sequence
  Chr1p_5  Reverse Primer
tcgatgaccatatcaccgac

SEQ ID NO: 26999 - DNA, 20 bp, Artificial Sequence
  Chr1p_5  Reverse Primer
tggtgcctttgtctgtaccc

SEQ ID NO: 27000 - DNA, 20 bp, Artificial Sequence
  Chr1p_5  Reverse Primer
cacccacacgattaagcaga

SEQ ID NO: 27001 - DNA, 20 bp, Artificial Sequence
  Chr1p_5  Reverse Primer
gagcccactgagggagaaag

SEQ ID NO: 27002 - DNA, 20 bp, Artificial Sequence
  Chr1p_5  Reverse Primer
aactggttgaccccatgaga

SEQ ID NO: 27003 - DNA, 20 bp, Artificial Sequence
  Chr1p_5  Reverse Primer
ggccattcagaccagtgttt

SEQ ID NO: 27004 - DNA, 19 bp, Artificial Sequence
  Chr1p_5  Reverse Primer
aaaaactcccaaagccgtc

SEQ ID NO: 27005 - DNA, 20 bp, Artificial Sequence
  Chr1p_5  Reverse Primer
atgtctccaaccttcaaccg

SEQ ID NO: 27006 - DNA, 20 bp, Artificial Sequence
  Chr1p_5  Reverse Primer
tctgcttgagtttccctggt

SEQ ID NO: 27007 - DNA, 20 bp, Artificial Sequence
  Chr1p_5  Reverse Primer
cagtcgaggcaggatttgtt

SEQ ID NO: 27008 - DNA, 20 bp, Artificial Sequence
  Chr1p_5  Reverse Primer
gacaaggaaaggctgcaaag

SEQ ID NO: 27009 - DNA, 20 bp, Artificial Sequence
  Chr1p_5  Reverse Primer
tgctcacaggagaaaaagca

SEQ ID NO: 27010 - DNA, 20 bp, Artificial Sequence
  Chr1p_5  Reverse Primer
ccaatcctgactttttgcct

SEQ ID NO: 27011 - DNA, 22 bp, Artificial Sequence
  Chr1p_5  Reverse Primer
tccaatgactagagggatgtca

SEQ ID NO: 27012 - DNA, 20 bp, Artificial Sequence
  Chr1p_5  Reverse Primer
attttgtcctggtttgcctg

SEQ ID NO: 27013 - DNA, 20 bp, Artificial Sequence
  Chr1p_5  Reverse Primer
gtcaagaggcacaggatggt

SEQ ID NO: 27014 - DNA, 20 bp, Artificial Sequence
  Chr1p_5  Reverse Primer
aggtaagcaagacctggggt

SEQ ID NO: 27015 - DNA, 20 bp, Artificial Sequence
  Chr1p_5  Reverse Primer
catccatccatcggaagaag

SEQ ID NO: 27016 - DNA, 20 bp, Artificial Sequence
  Chr1p_5  Reverse Primer
agtgctggccctgtagtcat

SEQ ID NO: 27017 - DNA, 20 bp, Artificial Sequence
  Chr1p_5  Reverse Primer
tcatggtgtggtagagcagg

SEQ ID NO: 27018 - DNA, 20 bp, Artificial Sequence
  Chr1p_5  Reverse Primer
tcttctggtctggggttcag

SEQ ID NO: 27019 - DNA, 20 bp, Artificial Sequence
  Chr1p_5  Reverse Primer
ccattacttcccactcccct

SEQ ID NO: 27020 - DNA, 20 bp, Artificial Sequence
  Chr1p_5  Reverse Primer
atcttgccccagccttatct

SEQ ID NO: 27021 - DNA, 20 bp, Artificial Sequence
  Chr1p_5  Reverse Primer
ctgagtgcctcctcttcagc

SEQ ID NO: 27022 - DNA, 20 bp, Artificial Sequence
  Chr1p_5  Reverse Primer
tctttgcccagacatccttc

SEQ ID NO: 27023 - DNA, 20 bp, Artificial Sequence
  Chr1p_5  Reverse Primer
tcaactgctccaaaagggac

SEQ ID NO: 27024 - DNA, 20 bp, Artificial Sequence
  Chr1p_5  Reverse Primer
caaagctaccttgggagtcg

SEQ ID NO: 27025 - DNA, 20 bp, Artificial Sequence
  Chr1p_5  Reverse Primer
ccacagaaatgctttctcca

SEQ ID NO: 27026 - DNA, 20 bp, Artificial Sequence
  Chr1p_5  Reverse Primer
ccaatatcctggtgggtcag

SEQ ID NO: 27027 - DNA, 20 bp, Artificial Sequence
  Chr1p_5  Reverse Primer
gccaggatcgtgatgatttt

SEQ ID NO: 27028 - DNA, 20 bp, Artificial Sequence
  Chr1p_5  Reverse Primer
gtctcccagaatcaaatggc

SEQ ID NO: 27029 - DNA, 20 bp, Artificial Sequence
  Chr1p_5  Reverse Primer
gttgaagaaagcaagccagg

SEQ ID NO: 27030 - DNA, 20 bp, Artificial Sequence
  Chr1p_5  Reverse Primer
cagagaagccaagaggatgg

SEQ ID NO: 27031 - DNA, 20 bp, Artificial Sequence
  Chr1p_5  Reverse Primer
aagagagggtcagcaggtca

SEQ ID NO: 27032 - DNA, 20 bp, Artificial Sequence
  Chr1p_5  Reverse Primer
gggagattcaggggaaagag

SEQ ID NO: 27033 - DNA, 20 bp, Artificial Sequence
  Chr1p_5  Reverse Primer
gtccccatgaaaagcttcaa

SEQ ID NO: 27034 - DNA, 25 bp, Artificial Sequence
  Chr1p_5  Reverse Primer
tgaaacctaaaagtcataaagggaa

SEQ ID NO: 27035 - DNA, 20 bp, Artificial Sequence
  Chr1p_5  Reverse Primer
ggtccctttcccacaaattc

SEQ ID NO: 27036 - DNA, 20 bp, Artificial Sequence
  Chr1p_5  Reverse Primer
gacaggactgaaacgccaat

SEQ ID NO: 27037 - DNA, 20 bp, Artificial Sequence
  Chr1p_5  Reverse Primer
cttccacctgctttcagagg

SEQ ID NO: 27038 - DNA, 20 bp, Artificial Sequence
  Chr1p_5  Reverse Primer
atgcaaatctgaatggagcc

SEQ ID NO: 27039 - DNA, 20 bp, Artificial Sequence
  Chr1p_5  Reverse Primer
gctgcagttaaccagggaag

SEQ ID NO: 27040 - DNA, 20 bp, Artificial Sequence
  Chr1p_5  Reverse Primer
caaataccagccgggtctaa

SEQ ID NO: 27041 - DNA, 20 bp, Artificial Sequence
  Chr1p_6  Forward Primer
cgctttcttcaggtctttgc

SEQ ID NO: 27042 - DNA, 25 bp, Artificial Sequence
  Chr1p_6  Forward Primer
cctagcacaaaacagcgaatattta

SEQ ID NO: 27043 - DNA, 20 bp, Artificial Sequence
  Chr1p_6  Forward Primer
gccctaagaaagcgtgtttg

SEQ ID NO: 27044 - DNA, 20 bp, Artificial Sequence
  Chr1p_6  Forward Primer
ttcgtgctggactacaatgc

SEQ ID NO: 27045 - DNA, 20 bp, Artificial Sequence
  Chr1p_6  Forward Primer
ggggtgagccaagtttcttt

SEQ ID NO: 27046 - DNA, 20 bp, Artificial Sequence
  Chr1p_6  Forward Primer
gctcaaacgacgccttaact

SEQ ID NO: 27047 - DNA, 20 bp, Artificial Sequence
  Chr1p_6  Forward Primer
tcgcattcgatatggagagt

SEQ ID NO: 27048 - DNA, 20 bp, Artificial Sequence
  Chr1p_6  Forward Primer
agctgctatgtgcgttttca

SEQ ID NO: 27049 - DNA, 20 bp, Artificial Sequence
  Chr1p_6  Forward Primer
cgctttcactacaggaagga

SEQ ID NO: 27050 - DNA, 20 bp, Artificial Sequence
  Chr1p_6  Forward Primer
tgcctagcccagaaagaatc

SEQ ID NO: 27051 - DNA, 24 bp, Artificial Sequence
  Chr1p_6  Forward Primer
tgcttacagagaaacaacagacaa

SEQ ID NO: 27052 - DNA, 20 bp, Artificial Sequence
  Chr1p_6  Forward Primer
ttgtgtagccttccaagcaa

SEQ ID NO: 27053 - DNA, 20 bp, Artificial Sequence
  Chr1p_6  Forward Primer
tagatgaaatggccagggag

SEQ ID NO: 27054 - DNA, 20 bp, Artificial Sequence
  Chr1p_6  Forward Primer
ccgtatgagcagagagggaa

SEQ ID NO: 27055 - DNA, 21 bp, Artificial Sequence
  Chr1p_6  Forward Primer
tctccctctctttttcttggc

SEQ ID NO: 27056 - DNA, 20 bp, Artificial Sequence
  Chr1p_6  Forward Primer
caggaggttgcttttgatgg

SEQ ID NO: 27057 - DNA, 20 bp, Artificial Sequence
  Chr1p_6  Forward Primer
aaatctgggctgcagataaa

SEQ ID NO: 27058 - DNA, 19 bp, Artificial Sequence
  Chr1p_6  Forward Primer
gggattggcagaggaaaaa

SEQ ID NO: 27059 - DNA, 20 bp, Artificial Sequence
  Chr1p_6  Forward Primer
ggttggagtggcttgaagag

SEQ ID NO: 27060 - DNA, 20 bp, Artificial Sequence
  Chr1p_6  Forward Primer
cagtgggaactggaaaaagg

SEQ ID NO: 27061 - DNA, 22 bp, Artificial Sequence
  Chr1p_6  Forward Primer
tttgcattttaaaaccactgct

SEQ ID NO: 27062 - DNA, 23 bp, Artificial Sequence
  Chr1p_6  Forward Primer
ttcttttgggcattaatcatctt

SEQ ID NO: 27063 - DNA, 20 bp, Artificial Sequence
  Chr1p_6  Forward Primer
gccatctttgcttcctgtgt

SEQ ID NO: 27064 - DNA, 20 bp, Artificial Sequence
  Chr1p_6  Forward Primer
cattgaggccccatgataag

SEQ ID NO: 27065 - DNA, 20 bp, Artificial Sequence
  Chr1p_6  Forward Primer
tggattccatttgctcacaa

SEQ ID NO: 27066 - DNA, 24 bp, Artificial Sequence
  Chr1p_6  Forward Primer
taggatggactgactttttcatta

SEQ ID NO: 27067 - DNA, 21 bp, Artificial Sequence
  Chr1p_6  Forward Primer
gctttgttgctaaacccaatg

SEQ ID NO: 27068 - DNA, 23 bp, Artificial Sequence
  Chr1p_6  Forward Primer
gaaggaagaaaagtcacacctga

SEQ ID NO: 27069 - DNA, 23 bp, Artificial Sequence
  Chr1p_6  Forward Primer
cctttgaacagtgaagacattga

SEQ ID NO: 27070 - DNA, 20 bp, Artificial Sequence
  Chr1p_6  Forward Primer
tacctcaatggaaagcctgc

SEQ ID NO: 27071 - DNA, 20 bp, Artificial Sequence
  Chr1p_6  Forward Primer
aacaaggagcttttggagca

SEQ ID NO: 27072 - DNA, 21 bp, Artificial Sequence
  Chr1p_6  Forward Primer
tgggagaagtactgatggtgg

SEQ ID NO: 27073 - DNA, 21 bp, Artificial Sequence
  Chr1p_6  Forward Primer
gggatgcaaaaaccctaagtc

SEQ ID NO: 27074 - DNA, 21 bp, Artificial Sequence
  Chr1p_6  Forward Primer
gcacagtgtctggcacataag

SEQ ID NO: 27075 - DNA, 20 bp, Artificial Sequence
  Chr1p_6  Forward Primer
tccaggctgttccatctctt

SEQ ID NO: 27076 - DNA, 21 bp, Artificial Sequence
  Chr1p_6  Forward Primer
ggagtgagtgagagttgctgc

SEQ ID NO: 27077 - DNA, 20 bp, Artificial Sequence
  Chr1p_6  Forward Primer
cactggctatgtgtgcaacc

SEQ ID NO: 27078 - DNA, 24 bp, Artificial Sequence
  Chr1p_6  Forward Primer
gtgccttaagaaaagtaatatggc

SEQ ID NO: 27079 - DNA, 20 bp, Artificial Sequence
  Chr1p_6  Forward Primer
aaagcttgcagtcctgttgg

SEQ ID NO: 27080 - DNA, 26 bp, Artificial Sequence
  Chr1p_6  Forward Primer
catgtttctcacattaagtaagccat

SEQ ID NO: 27081 - DNA, 21 bp, Artificial Sequence
  Chr1p_6  Forward Primer
tctagcagggccttacaaatg

SEQ ID NO: 27082 - DNA, 21 bp, Artificial Sequence
  Chr1p_6  Forward Primer
tgtttggaatcagcattcctt

SEQ ID NO: 27083 - DNA, 21 bp, Artificial Sequence
  Chr1p_6  Forward Primer
cgtgtctccgtcctatcattt

SEQ ID NO: 27084 - DNA, 20 bp, Artificial Sequence
  Chr1p_6  Forward Primer
ttgccctagtccttacccct

SEQ ID NO: 27085 - DNA, 22 bp, Artificial Sequence
  Chr1p_6  Forward Primer
gggagatagctgtacccctttt

SEQ ID NO: 27086 - DNA, 20 bp, Artificial Sequence
  Chr1p_6  Forward Primer
tgaagggttggctatctgct

SEQ ID NO: 27087 - DNA, 21 bp, Artificial Sequence
  Chr1p_6  Forward Primer
aatcctgttttgtcatccagc

SEQ ID NO: 27088 - DNA, 20 bp, Artificial Sequence
  Chr1p_6  Forward Primer
tttgcttcagaccaggaggt

SEQ ID NO: 27089 - DNA, 20 bp, Artificial Sequence
  Chr1p_6  Forward Primer
gagaatgatttgccggacag

SEQ ID NO: 27090 - DNA, 21 bp, Artificial Sequence
  Chr1p_6  Forward Primer
tccctttctccaagtcctctt

SEQ ID NO: 27091 - DNA, 20 bp, Artificial Sequence
  Chr1p_6  Forward Primer
ccccaggttgaaacttgaaa

SEQ ID NO: 27092 - DNA, 20 bp, Artificial Sequence
  Chr1p_6  Forward Primer
gggacctgtcttgccttttt

SEQ ID NO: 27093 - DNA, 23 bp, Artificial Sequence
  Chr1p_6  Forward Primer
tcaactctgcttggtattgagaa

SEQ ID NO: 27094 - DNA, 20 bp, Artificial Sequence
  Chr1p_6  Forward Primer
taggctttgcttggctcagt

SEQ ID NO: 27095 - DNA, 20 bp, Artificial Sequence
  Chr1p_6  Forward Primer
agcccagggtggaaatctaa

SEQ ID NO: 27096 - DNA, 21 bp, Artificial Sequence
  Chr1p_6  Forward Primer
gccttctaggtggttctctga

SEQ ID NO: 27097 - DNA, 20 bp, Artificial Sequence
  Chr1p_6  Forward Primer
acataattgttggggcaggt

SEQ ID NO: 27098 - DNA, 20 bp, Artificial Sequence
  Chr1p_6  Forward Primer
tggctagggatgcagtttct

SEQ ID NO: 27099 - DNA, 20 bp, Artificial Sequence
  Chr1p_6  Forward Primer
tgcaggatggaaatgagaca

SEQ ID NO: 27100 - DNA, 21 bp, Artificial Sequence
  Chr1p_6  Forward Primer
tgacagagcactgcagttgaa

SEQ ID NO: 27101 - DNA, 20 bp, Artificial Sequence
  Chr1p_6  Forward Primer
ggcaagggtctgtgagagtc

SEQ ID NO: 27102 - DNA, 20 bp, Artificial Sequence
  Chr1p_6  Forward Primer
tgcacacacgtgcattttac

SEQ ID NO: 27103 - DNA, 20 bp, Artificial Sequence
  Chr1p_6  Forward Primer
ctgactctgacattgggcac

SEQ ID NO: 27104 - DNA, 20 bp, Artificial Sequence
  Chr1p_6  Forward Primer
gttctgcaccccctatctga

SEQ ID NO: 27105 - DNA, 20 bp, Artificial Sequence
  Chr1p_6  Forward Primer
cacagttgcctggcacataa

SEQ ID NO: 27106 - DNA, 20 bp, Artificial Sequence
  Chr1p_6  Forward Primer
gctgtgctggatgattttca

SEQ ID NO: 27107 - DNA, 20 bp, Artificial Sequence
  Chr1p_6  Forward Primer
accagtggaggaaagcagaa

SEQ ID NO: 27108 - DNA, 20 bp, Artificial Sequence
  Chr1p_6  Forward Primer
ggcaaaaacaaatacagggc

SEQ ID NO: 27109 - DNA, 20 bp, Artificial Sequence
  Chr1p_6  Forward Primer
aaagggccttaggaatcacc

SEQ ID NO: 27110 - DNA, 24 bp, Artificial Sequence
  Chr1p_6  Forward Primer
cagtaatgacttctgttagtgccc

SEQ ID NO: 27111 - DNA, 22 bp, Artificial Sequence
  Chr1p_6  Forward Primer
atattccaggcaagtgctaacc

SEQ ID NO: 27112 - DNA, 24 bp, Artificial Sequence
  Chr1p_6  Forward Primer
aaaactgcatctatggaagtctga

SEQ ID NO: 27113 - DNA, 20 bp, Artificial Sequence
  Chr1p_6  Forward Primer
accctggttagattgggagg

SEQ ID NO: 27114 - DNA, 21 bp, Artificial Sequence
  Chr1p_6  Forward Primer
taaaatttgggaaaggggaga

SEQ ID NO: 27115 - DNA, 20 bp, Artificial Sequence
  Chr1p_6  Forward Primer
aagccattctgctcccttct

SEQ ID NO: 27116 - DNA, 21 bp, Artificial Sequence
  Chr1p_6  Forward Primer
ttgttggacttttggcaaact

SEQ ID NO: 27117 - DNA, 20 bp, Artificial Sequence
  Chr1p_6  Forward Primer
ggaaccagttcaccagccta

SEQ ID NO: 27118 - DNA, 20 bp, Artificial Sequence
  Chr1p_6  Forward Primer
tgggggtcataaaagtggag

SEQ ID NO: 27119 - DNA, 20 bp, Artificial Sequence
  Chr1p_6  Forward Primer
cttgtaggctaggctgtggc

SEQ ID NO: 27120 - DNA, 20 bp, Artificial Sequence
  Chr1p_6  Forward Primer
aaattgaaaattggcaggga

SEQ ID NO: 27121 - DNA, 20 bp, Artificial Sequence
  Chr1p_6  Forward Primer
cctgattcctgccttctcag

SEQ ID NO: 27122 - DNA, 25 bp, Artificial Sequence
  Chr1p_6  Forward Primer
aaaggagacatagaaagcagaacta

SEQ ID NO: 27123 - DNA, 21 bp, Artificial Sequence
  Chr1p_6  Forward Primer
tcaaatggtcagaaaccatga

SEQ ID NO: 27124 - DNA, 21 bp, Artificial Sequence
  Chr1p_6  Forward Primer
tgcatatcctgtgacctagca

SEQ ID NO: 27125 - DNA, 20 bp, Artificial Sequence
  Chr1p_6  Forward Primer
cggcctgagggacttatttt

SEQ ID NO: 27126 - DNA, 20 bp, Artificial Sequence
  Chr1p_6  Forward Primer
aagctgggtgacgatagtgg

SEQ ID NO: 27127 - DNA, 21 bp, Artificial Sequence
  Chr1p_6  Forward Primer
caagaaacgatgaaagcctga

SEQ ID NO: 27128 - DNA, 20 bp, Artificial Sequence
  Chr1p_6  Forward Primer
ttcagttccccattgtgtgt

SEQ ID NO: 27129 - DNA, 20 bp, Artificial Sequence
  Chr1p_6  Forward Primer
tggaagcacttggaagaagg

SEQ ID NO: 27130 - DNA, 20 bp, Artificial Sequence
  Chr1p_6  Forward Primer
tgcccttaaggaaggcatag

SEQ ID NO: 27131 - DNA, 20 bp, Artificial Sequence
  Chr1p_6  Forward Primer
ccagggtgagctgaaagaag

SEQ ID NO: 27132 - DNA, 21 bp, Artificial Sequence
  Chr1p_6  Forward Primer
ttgtgaaggttgcagtgtttg

SEQ ID NO: 27133 - DNA, 20 bp, Artificial Sequence
  Chr1p_6  Forward Primer
ggttcaccggtagaaagggt

SEQ ID NO: 27134 - DNA, 21 bp, Artificial Sequence
  Chr1p_6  Forward Primer
tgaagtctaacagaggccaga

SEQ ID NO: 27135 - DNA, 22 bp, Artificial Sequence
  Chr1p_6  Forward Primer
tgctttaataacgatgctgtcc

SEQ ID NO: 27136 - DNA, 20 bp, Artificial Sequence
  Chr1p_6  Forward Primer
tttatgtcccctttggcact

SEQ ID NO: 27137 - DNA, 20 bp, Artificial Sequence
  Chr1p_6  Reverse Primer
tggggatacaacagagcctt

SEQ ID NO: 27138 - DNA, 20 bp, Artificial Sequence
  Chr1p_6  Reverse Primer
gcgagaatgcaaacgtgaat

SEQ ID NO: 27139 - DNA, 20 bp, Artificial Sequence
  Chr1p_6  Reverse Primer
gcccttcatcacgttagtcc

SEQ ID NO: 27140 - DNA, 20 bp, Artificial Sequence
  Chr1p_6  Reverse Primer
cctcattggctatccgagac

SEQ ID NO: 27141 - DNA, 20 bp, Artificial Sequence
  Chr1p_6  Reverse Primer
aatccctggagggaagctaa

SEQ ID NO: 27142 - DNA, 20 bp, Artificial Sequence
  Chr1p_6  Reverse Primer
cacacacacacacaaccacg

SEQ ID NO: 27143 - DNA, 20 bp, Artificial Sequence
  Chr1p_6  Reverse Primer
tcccctttctctcatcaacc

SEQ ID NO: 27144 - DNA, 20 bp, Artificial Sequence
  Chr1p_6  Reverse Primer
tttaaaagcctggagcctca

SEQ ID NO: 27145 - DNA, 20 bp, Artificial Sequence
  Chr1p_6  Reverse Primer
agttgcctctctttcatgcc

SEQ ID NO: 27146 - DNA, 20 bp, Artificial Sequence
  Chr1p_6  Reverse Primer
ccttcctctggcaaggataa

SEQ ID NO: 27147 - DNA, 21 bp, Artificial Sequence
  Chr1p_6  Reverse Primer
cttcaaatccttcagaatccg

SEQ ID NO: 27148 - DNA, 20 bp, Artificial Sequence
  Chr1p_6  Reverse Primer
cgcaatgatcctaacccaat

SEQ ID NO: 27149 - DNA, 20 bp, Artificial Sequence
  Chr1p_6  Reverse Primer
tgccaggcacacaataggta

SEQ ID NO: 27150 - DNA, 20 bp, Artificial Sequence
  Chr1p_6  Reverse Primer
actgccctggggataaagtt

SEQ ID NO: 27151 - DNA, 21 bp, Artificial Sequence
  Chr1p_6  Reverse Primer
ttccacctatattcttgccca

SEQ ID NO: 27152 - DNA, 20 bp, Artificial Sequence
  Chr1p_6  Reverse Primer
gatttttgtcccaagctcca

SEQ ID NO: 27153 - DNA, 20 bp, Artificial Sequence
  Chr1p_6  Reverse Primer
agaccctgagccagaactca

SEQ ID NO: 27154 - DNA, 20 bp, Artificial Sequence
  Chr1p_6  Reverse Primer
accactccatggaaactgct

SEQ ID NO: 27155 - DNA, 20 bp, Artificial Sequence
  Chr1p_6  Reverse Primer
actccttgcgtcctgactgt

SEQ ID NO: 27156 - DNA, 22 bp, Artificial Sequence
  Chr1p_6  Reverse Primer
tccagacagtgtgtaacagcaa

SEQ ID NO: 27157 - DNA, 20 bp, Artificial Sequence
  Chr1p_6  Reverse Primer
atgtttgatgggagtggtgc

SEQ ID NO: 27158 - DNA, 20 bp, Artificial Sequence
  Chr1p_6  Reverse Primer
aacagccttctgcctcactc

SEQ ID NO: 27159 - DNA, 20 bp, Artificial Sequence
  Chr1p_6  Reverse Primer
cttccaactggcatggtcta

SEQ ID NO: 27160 - DNA, 20 bp, Artificial Sequence
  Chr1p_6  Reverse Primer
gtgttcccaccaaatggact

SEQ ID NO: 27161 - DNA, 23 bp, Artificial Sequence
  Chr1p_6  Reverse Primer
aaaaagaataaaaagcaacaggc

SEQ ID NO: 27162 - DNA, 21 bp, Artificial Sequence
  Chr1p_6  Reverse Primer
cctctgctggaattttcagtg

SEQ ID NO: 27163 - DNA, 21 bp, Artificial Sequence
  Chr1p_6  Reverse Primer
tgcaatagtcctttccaaaaa

SEQ ID NO: 27164 - DNA, 22 bp, Artificial Sequence
  Chr1p_6  Reverse Primer
ttttgttcatttgcctcttgaa

SEQ ID NO: 27165 - DNA, 20 bp, Artificial Sequence
  Chr1p_6  Reverse Primer
caaaggcctctgcagaaagt

SEQ ID NO: 27166 - DNA, 20 bp, Artificial Sequence
  Chr1p_6  Reverse Primer
acagaggatgttgcctgtca

SEQ ID NO: 27167 - DNA, 20 bp, Artificial Sequence
  Chr1p_6  Reverse Primer
gagggcccagaataacaaga

SEQ ID NO: 27168 - DNA, 20 bp, Artificial Sequence
  Chr1p_6  Reverse Primer
catttcagccgacttggatt

SEQ ID NO: 27169 - DNA, 20 bp, Artificial Sequence
  Chr1p_6  Reverse Primer
aaattgcaggcagaggattg

SEQ ID NO: 27170 - DNA, 20 bp, Artificial Sequence
  Chr1p_6  Reverse Primer
cccaaagagtttgcattcag

SEQ ID NO: 27171 - DNA, 20 bp, Artificial Sequence
  Chr1p_6  Reverse Primer
ccctcctttccctgtcagtt

SEQ ID NO: 27172 - DNA, 21 bp, Artificial Sequence
  Chr1p_6  Reverse Primer
tgcttcatattttgattggga

SEQ ID NO: 27173 - DNA, 20 bp, Artificial Sequence
  Chr1p_6  Reverse Primer
ccaccccaactcaatatgct

SEQ ID NO: 27174 - DNA, 20 bp, Artificial Sequence
  Chr1p_6  Reverse Primer
acaactaggaatgcctcccc

SEQ ID NO: 27175 - DNA, 20 bp, Artificial Sequence
  Chr1p_6  Reverse Primer
cccaagtaacacaggggaaa

SEQ ID NO: 27176 - DNA, 20 bp, Artificial Sequence
  Chr1p_6  Reverse Primer
aagcagctttttgctggcta

SEQ ID NO: 27177 - DNA, 20 bp, Artificial Sequence
  Chr1p_6  Reverse Primer
aggcagcaaacaccttagga

SEQ ID NO: 27178 - DNA, 20 bp, Artificial Sequence
  Chr1p_6  Reverse Primer
aaaattaaaatcggctgccc

SEQ ID NO: 27179 - DNA, 22 bp, Artificial Sequence
  Chr1p_6  Reverse Primer
tgatccagaataccttgtgtgc

SEQ ID NO: 27180 - DNA, 20 bp, Artificial Sequence
  Chr1p_6  Reverse Primer
ccagatatgccaaagggttg

SEQ ID NO: 27181 - DNA, 22 bp, Artificial Sequence
  Chr1p_6  Reverse Primer
tgtccatggatttctcaatgtt

SEQ ID NO: 27182 - DNA, 20 bp, Artificial Sequence
  Chr1p_6  Reverse Primer
cccacccacactcatctttc

SEQ ID NO: 27183 - DNA, 20 bp, Artificial Sequence
  Chr1p_6  Reverse Primer
cataacgccagcaatcttcc

SEQ ID NO: 27184 - DNA, 20 bp, Artificial Sequence
  Chr1p_6  Reverse Primer
gcaggacagagtcatctccc

SEQ ID NO: 27185 - DNA, 20 bp, Artificial Sequence
  Chr1p_6  Reverse Primer
agcagaagcagcagatcctc

SEQ ID NO: 27186 - DNA, 24 bp, Artificial Sequence
  Chr1p_6  Reverse Primer
tttttaaaatgaggctgaaaagaa

SEQ ID NO: 27187 - DNA, 20 bp, Artificial Sequence
  Chr1p_6  Reverse Primer
cacgcaaatccagaatgtgt

SEQ ID NO: 27188 - DNA, 20 bp, Artificial Sequence
  Chr1p_6  Reverse Primer
tcgcccttttactgtaccct

SEQ ID NO: 27189 - DNA, 20 bp, Artificial Sequence
  Chr1p_6  Reverse Primer
aagcagcaaaacaagccaat

SEQ ID NO: 27190 - DNA, 20 bp, Artificial Sequence
  Chr1p_6  Reverse Primer
ctgtgtgttcccctgttgtg

SEQ ID NO: 27191 - DNA, 21 bp, Artificial Sequence
  Chr1p_6  Reverse Primer
tgcccccagataattatgaca

SEQ ID NO: 27192 - DNA, 21 bp, Artificial Sequence
  Chr1p_6  Reverse Primer
tctgccaatttctcttccaaa

SEQ ID NO: 27193 - DNA, 21 bp, Artificial Sequence
  Chr1p_6  Reverse Primer
tcacttaatttccagcccttg

SEQ ID NO: 27194 - DNA, 20 bp, Artificial Sequence
  Chr1p_6  Reverse Primer
cagcggtatttcccagttct

SEQ ID NO: 27195 - DNA, 21 bp, Artificial Sequence
  Chr1p_6  Reverse Primer
tctcaagccaaaagagcagtt

SEQ ID NO: 27196 - DNA, 20 bp, Artificial Sequence
  Chr1p_6  Reverse Primer
atttaattggggcacgtgga

SEQ ID NO: 27197 - DNA, 20 bp, Artificial Sequence
  Chr1p_6  Reverse Primer
atgtgccaggacctaatcgt

SEQ ID NO: 27198 - DNA, 20 bp, Artificial Sequence
  Chr1p_6  Reverse Primer
ccagtggtccctcttggtta

SEQ ID NO: 27199 - DNA, 20 bp, Artificial Sequence
  Chr1p_6  Reverse Primer
ggcaagggcaagatcagtag

SEQ ID NO: 27200 - DNA, 20 bp, Artificial Sequence
  Chr1p_6  Reverse Primer
cagcctgggtaaagagcaag

SEQ ID NO: 27201 - DNA, 20 bp, Artificial Sequence
  Chr1p_6  Reverse Primer
catgtgggtgttttgctttg

SEQ ID NO: 27202 - DNA, 20 bp, Artificial Sequence
  Chr1p_6  Reverse Primer
tagtccagaggaatgggagc

SEQ ID NO: 27203 - DNA, 20 bp, Artificial Sequence
  Chr1p_6  Reverse Primer
ggccacactgcctctttaat

SEQ ID NO: 27204 - DNA, 21 bp, Artificial Sequence
  Chr1p_6  Reverse Primer
cctattaagctccaaacaccg

SEQ ID NO: 27205 - DNA, 22 bp, Artificial Sequence
  Chr1p_6  Reverse Primer
atgcatctctcaggaaatcaca

SEQ ID NO: 27206 - DNA, 21 bp, Artificial Sequence
  Chr1p_6  Reverse Primer
aacgagaaaagccacaatgaa

SEQ ID NO: 27207 - DNA, 20 bp, Artificial Sequence
  Chr1p_6  Reverse Primer
tatgtgtgtgaggtgggtgg

SEQ ID NO: 27208 - DNA, 23 bp, Artificial Sequence
  Chr1p_6  Reverse Primer
tcacagaatcacagttcagttgg

SEQ ID NO: 27209 - DNA, 22 bp, Artificial Sequence
  Chr1p_6  Reverse Primer
ttgtcaagttctttgacagcct

SEQ ID NO: 27210 - DNA, 20 bp, Artificial Sequence
  Chr1p_6  Reverse Primer
ttccagctttctccaagacc

SEQ ID NO: 27211 - DNA, 20 bp, Artificial Sequence
  Chr1p_6  Reverse Primer
cctgatccaaagcctgttct

SEQ ID NO: 27212 - DNA, 21 bp, Artificial Sequence
  Chr1p_6  Reverse Primer
cacagcatagctactcccatt

SEQ ID NO: 27213 - DNA, 20 bp, Artificial Sequence
  Chr1p_6  Reverse Primer
cacagtcttgtcccactgga

SEQ ID NO: 27214 - DNA, 20 bp, Artificial Sequence
  Chr1p_6  Reverse Primer
ttttgcacatgttccctctg

SEQ ID NO: 27215 - DNA, 20 bp, Artificial Sequence
  Chr1p_6  Reverse Primer
ccttccattccttggaggat

SEQ ID NO: 27216 - DNA, 20 bp, Artificial Sequence
  Chr1p_6  Reverse Primer
ggctaggactcccaacaaca

SEQ ID NO: 27217 - DNA, 20 bp, Artificial Sequence
  Chr1p_6  Reverse Primer
gtcccaaggccatgaaaata

SEQ ID NO: 27218 - DNA, 25 bp, Artificial Sequence
  Chr1p_6  Reverse Primer
tgacaagactggactatctttttct

SEQ ID NO: 27219 - DNA, 21 bp, Artificial Sequence
  Chr1p_6  Reverse Primer
tcaaatcgtcctcaaaagtgg

SEQ ID NO: 27220 - DNA, 25 bp, Artificial Sequence
  Chr1p_6  Reverse Primer
gcagtagtttgttcacttttattgc

SEQ ID NO: 27221 - DNA, 21 bp, Artificial Sequence
  Chr1p_6  Reverse Primer
tgcacaattgatctgatgctc

SEQ ID NO: 27222 - DNA, 20 bp, Artificial Sequence
  Chr1p_6  Reverse Primer
cctgccttcagtctggacac

SEQ ID NO: 27223 - DNA, 21 bp, Artificial Sequence
  Chr1p_6  Reverse Primer
tgcctgctctttctcttgagt

SEQ ID NO: 27224 - DNA, 21 bp, Artificial Sequence
  Chr1p_6  Reverse Primer
cctccaagagcacttttcaca

SEQ ID NO: 27225 - DNA, 20 bp, Artificial Sequence
  Chr1p_6  Reverse Primer
gccactgagcctttctgaac

SEQ ID NO: 27226 - DNA, 20 bp, Artificial Sequence
  Chr1p_6  Reverse Primer
gcaaaatcccaataaggcaa

SEQ ID NO: 27227 - DNA, 20 bp, Artificial Sequence
  Chr1p_6  Reverse Primer
agccagatccacagtcgttt

SEQ ID NO: 27228 - DNA, 20 bp, Artificial Sequence
  Chr1p_6  Reverse Primer
cgaaacatagcagtggcaga

SEQ ID NO: 27229 - DNA, 21 bp, Artificial Sequence
  Chr1p_6  Reverse Primer
tttcttgaactgctcgaaaca

SEQ ID NO: 27230 - DNA, 24 bp, Artificial Sequence
  Chr1p_6  Reverse Primer
tttaaggttatgtggaagaaagca

SEQ ID NO: 27231 - DNA, 20 bp, Artificial Sequence
  Chr1p_6  Reverse Primer
cacccagcagctctttcttg

SEQ ID NO: 27232 - DNA, 21 bp, Artificial Sequence
  Chr1p_6  Reverse Primer
ccaagttctttgcaaaatcca

SEQ ID NO: 27233 - DNA, 20 bp, Artificial Sequence
  Chr1p_7  Forward Primer
tttggtgagaacacagggtg

SEQ ID NO: 27234 - DNA, 20 bp, Artificial Sequence
  Chr1p_7  Forward Primer
gatgcgggcatagagagaag

SEQ ID NO: 27235 - DNA, 20 bp, Artificial Sequence
  Chr1p_7  Forward Primer
catttggacccagagcaact

SEQ ID NO: 27236 - DNA, 20 bp, Artificial Sequence
  Chr1p_7  Forward Primer
gtgctggggaaatacatcgt

SEQ ID NO: 27237 - DNA, 20 bp, Artificial Sequence
  Chr1p_7  Forward Primer
acttggcctcctctgaaaca

SEQ ID NO: 27238 - DNA, 20 bp, Artificial Sequence
  Chr1p_7  Forward Primer
tcgagacctttggagtttgg

SEQ ID NO: 27239 - DNA, 20 bp, Artificial Sequence
  Chr1p_7  Forward Primer
agtgcagtccctgctgtctt

SEQ ID NO: 27240 - DNA, 20 bp, Artificial Sequence
  Chr1p_7  Forward Primer
ccagagcccatctttttagc

SEQ ID NO: 27241 - DNA, 20 bp, Artificial Sequence
  Chr1p_7  Forward Primer
tgccatctctgcatgctatc

SEQ ID NO: 27242 - DNA, 19 bp, Artificial Sequence
  Chr1p_7  Forward Primer
ctgaaatcaatctggcccc

SEQ ID NO: 27243 - DNA, 20 bp, Artificial Sequence
  Chr1p_7  Forward Primer
ttagcactgaacccaggtga

SEQ ID NO: 27244 - DNA, 20 bp, Artificial Sequence
  Chr1p_7  Forward Primer
tggctcactccttccagtct

SEQ ID NO: 27245 - DNA, 20 bp, Artificial Sequence
  Chr1p_7  Forward Primer
caaaaggaggtctcccaacc

SEQ ID NO: 27246 - DNA, 20 bp, Artificial Sequence
  Chr1p_7  Forward Primer
tggtagaggaaaggcgagaa

SEQ ID NO: 27247 - DNA, 22 bp, Artificial Sequence
  Chr1p_7  Forward Primer
gcctggcttactcagattagtg

SEQ ID NO: 27248 - DNA, 20 bp, Artificial Sequence
  Chr1p_7  Forward Primer
gggggactttttctctcagc

SEQ ID NO: 27249 - DNA, 20 bp, Artificial Sequence
  Chr1p_7  Forward Primer
aaagggtgtgatgcatttgg

SEQ ID NO: 27250 - DNA, 21 bp, Artificial Sequence
  Chr1p_7  Forward Primer
aatcacaaaatcgaggtgagc

SEQ ID NO: 27251 - DNA, 22 bp, Artificial Sequence
  Chr1p_7  Forward Primer
caaatgtgcttggcatagagtc

SEQ ID NO: 27252 - DNA, 26 bp, Artificial Sequence
  Chr1p_7  Forward Primer
ttctttactattctttcttcagtgcc

SEQ ID NO: 27253 - DNA, 21 bp, Artificial Sequence
  Chr1p_7  Forward Primer
tgtcattgtgagcaagtgagc

SEQ ID NO: 27254 - DNA, 20 bp, Artificial Sequence
  Chr1p_7  Forward Primer
gggagttaacaatgcaggga

SEQ ID NO: 27255 - DNA, 20 bp, Artificial Sequence
  Chr1p_7  Forward Primer
ttggctgggaaacaaatagg

SEQ ID NO: 27256 - DNA, 20 bp, Artificial Sequence
  Chr1p_7  Forward Primer
ggaaagggactattccccaa

SEQ ID NO: 27257 - DNA, 20 bp, Artificial Sequence
  Chr1p_7  Forward Primer
aggaacaagcaatggaccac

SEQ ID NO: 27258 - DNA, 20 bp, Artificial Sequence
  Chr1p_7  Forward Primer
aaatgttccagagccctcct

SEQ ID NO: 27259 - DNA, 20 bp, Artificial Sequence
  Chr1p_7  Forward Primer
actagctgaactggaggcca

SEQ ID NO: 27260 - DNA, 20 bp, Artificial Sequence
  Chr1p_7  Forward Primer
cagggctaggcaaaagatca

SEQ ID NO: 27261 - DNA, 20 bp, Artificial Sequence
  Chr1p_7  Forward Primer
tgggaaaagaaccaggagag

SEQ ID NO: 27262 - DNA, 20 bp, Artificial Sequence
  Chr1p_7  Forward Primer
ttgatgcagggaagagtgtg

SEQ ID NO: 27263 - DNA, 20 bp, Artificial Sequence
  Chr1p_7  Forward Primer
accaagaaaaccaagctgga

SEQ ID NO: 27264 - DNA, 20 bp, Artificial Sequence
  Chr1p_7  Forward Primer
tagctgcattttgctgctgt

SEQ ID NO: 27265 - DNA, 20 bp, Artificial Sequence
  Chr1p_7  Forward Primer
ttcatttcctctttggtggc

SEQ ID NO: 27266 - DNA, 26 bp, Artificial Sequence
  Chr1p_7  Forward Primer
gggaaggaaattttaaacataagtga

SEQ ID NO: 27267 - DNA, 26 bp, Artificial Sequence
  Chr1p_7  Forward Primer
ttatccaccaactgatttagattttt

SEQ ID NO: 27268 - DNA, 20 bp, Artificial Sequence
  Chr1p_7  Forward Primer
ttgcagtctgccatttgaag

SEQ ID NO: 27269 - DNA, 23 bp, Artificial Sequence
  Chr1p_7  Forward Primer
ttgattccatccttcttcctaca

SEQ ID NO: 27270 - DNA, 20 bp, Artificial Sequence
  Chr1p_7  Forward Primer
tgctgtttctgttgcactcc

SEQ ID NO: 27271 - DNA, 20 bp, Artificial Sequence
  Chr1p_7  Forward Primer
ctacttgcaacaggcttggg

SEQ ID NO: 27272 - DNA, 21 bp, Artificial Sequence
  Chr1p_7  Forward Primer
cattctgacacttgcaaccaa

SEQ ID NO: 27273 - DNA, 20 bp, Artificial Sequence
  Chr1p_7  Forward Primer
gcacccacttcttgcacttt

SEQ ID NO: 27274 - DNA, 22 bp, Artificial Sequence
  Chr1p_7  Forward Primer
gccttgacttaagtgtgcttga

SEQ ID NO: 27275 - DNA, 21 bp, Artificial Sequence
  Chr1p_7  Forward Primer
cgattctgcttgaatccactt

SEQ ID NO: 27276 - DNA, 20 bp, Artificial Sequence
  Chr1p_7  Forward Primer
gggtcatgaaagagccaaaa

SEQ ID NO: 27277 - DNA, 20 bp, Artificial Sequence
  Chr1p_7  Forward Primer
gtgccttacctcacaggctt

SEQ ID NO: 27278 - DNA, 22 bp, Artificial Sequence
  Chr1p_7  Forward Primer
gagggaaaagtttataagggca

SEQ ID NO: 27279 - DNA, 20 bp, Artificial Sequence
  Chr1p_7  Forward Primer
tctccccactggaaatcaac

SEQ ID NO: 27280 - DNA, 22 bp, Artificial Sequence
  Chr1p_7  Forward Primer
tgttaggaaagatgcctcatca

SEQ ID NO: 27281 - DNA, 20 bp, Artificial Sequence
  Chr1p_7  Forward Primer
ctgactctgccccttaccag

SEQ ID NO: 27282 - DNA, 20 bp, Artificial Sequence
  Chr1p_7  Forward Primer
cggtgggtaagagaattgga

SEQ ID NO: 27283 - DNA, 20 bp, Artificial Sequence
  Chr1p_7  Forward Primer
tgggtatgtagggggagtga

SEQ ID NO: 27284 - DNA, 20 bp, Artificial Sequence
  Chr1p_7  Forward Primer
cactgcactccagtctgagc

SEQ ID NO: 27285 - DNA, 21 bp, Artificial Sequence
  Chr1p_7  Forward Primer
ttgagtcctggtaacccactg

SEQ ID NO: 27286 - DNA, 20 bp, Artificial Sequence
  Chr1p_7  Forward Primer
gggtcaaatctttgcacgtt

SEQ ID NO: 27287 - DNA, 20 bp, Artificial Sequence
  Chr1p_7  Forward Primer
ggcagtgatgaccagactca

SEQ ID NO: 27288 - DNA, 20 bp, Artificial Sequence
  Chr1p_7  Forward Primer
gtcaccaacaaggatttggg

SEQ ID NO: 27289 - DNA, 20 bp, Artificial Sequence
  Chr1p_7  Forward Primer
ctgagtccccgaagagctta

SEQ ID NO: 27290 - DNA, 20 bp, Artificial Sequence
  Chr1p_7  Forward Primer
cccaatatccactgtgcctt

SEQ ID NO: 27291 - DNA, 20 bp, Artificial Sequence
  Chr1p_7  Forward Primer
gacccatataggggaaaggc

SEQ ID NO: 27292 - DNA, 20 bp, Artificial Sequence
  Chr1p_7  Forward Primer
gaagataggggcagcagtga

SEQ ID NO: 27293 - DNA, 20 bp, Artificial Sequence
  Chr1p_7  Forward Primer
ttccccaataaggcaacaga

SEQ ID NO: 27294 - DNA, 24 bp, Artificial Sequence
  Chr1p_7  Forward Primer
cagacttcaaggaaaaattaccaa

SEQ ID NO: 27295 - DNA, 23 bp, Artificial Sequence
  Chr1p_7  Forward Primer
ttgacataagaactaatggtggg

SEQ ID NO: 27296 - DNA, 20 bp, Artificial Sequence
  Chr1p_7  Forward Primer
gtcatgtgggacaaagcaaa

SEQ ID NO: 27297 - DNA, 20 bp, Artificial Sequence
  Chr1p_7  Forward Primer
actggctaaccacatggtgc

SEQ ID NO: 27298 - DNA, 20 bp, Artificial Sequence
  Chr1p_7  Forward Primer
ttagttatgtggcgcgtgtc

SEQ ID NO: 27299 - DNA, 20 bp, Artificial Sequence
  Chr1p_7  Forward Primer
aatgcctgaacatgaaaggg

SEQ ID NO: 27300 - DNA, 20 bp, Artificial Sequence
  Chr1p_7  Forward Primer
gcagaatcatggcactcaaa

SEQ ID NO: 27301 - DNA, 20 bp, Artificial Sequence
  Chr1p_7  Forward Primer
agggaccatgtgatctgagc

SEQ ID NO: 27302 - DNA, 20 bp, Artificial Sequence
  Chr1p_7  Forward Primer
gtggaccacaggagcttgat

SEQ ID NO: 27303 - DNA, 20 bp, Artificial Sequence
  Chr1p_7  Forward Primer
atggatgttcatcaaagggc

SEQ ID NO: 27304 - DNA, 20 bp, Artificial Sequence
  Chr1p_7  Forward Primer
gtaacctccctgctgtcgag

SEQ ID NO: 27305 - DNA, 21 bp, Artificial Sequence
  Chr1p_7  Forward Primer
ttccttctttgcccaatatca

SEQ ID NO: 27306 - DNA, 20 bp, Artificial Sequence
  Chr1p_7  Forward Primer
caccacacttgggtgcacta

SEQ ID NO: 27307 - DNA, 24 bp, Artificial Sequence
  Chr1p_7  Forward Primer
aaattgaagagtttcttttcctga

SEQ ID NO: 27308 - DNA, 20 bp, Artificial Sequence
  Chr1p_7  Forward Primer
cccgtgttattcaatcaggc

SEQ ID NO: 27309 - DNA, 20 bp, Artificial Sequence
  Chr1p_7  Forward Primer
atcctggcagcattgtgatt

SEQ ID NO: 27310 - DNA, 20 bp, Artificial Sequence
  Chr1p_7  Forward Primer
agagcaaacttgggaaagca

SEQ ID NO: 27311 - DNA, 20 bp, Artificial Sequence
  Chr1p_7  Forward Primer
catccccaacaaacctcttc

SEQ ID NO: 27312 - DNA, 20 bp, Artificial Sequence
  Chr1p_7  Forward Primer
tcctgagtggtgggtacaga

SEQ ID NO: 27313 - DNA, 20 bp, Artificial Sequence
  Chr1p_7  Forward Primer
ttccattgaaggaggtgagc

SEQ ID NO: 27314 - DNA, 20 bp, Artificial Sequence
  Chr1p_7  Forward Primer
gcttgttccatgtgcgtaaa

SEQ ID NO: 27315 - DNA, 21 bp, Artificial Sequence
  Chr1p_7  Forward Primer
tggggatgtgatttatccaga

SEQ ID NO: 27316 - DNA, 20 bp, Artificial Sequence
  Chr1p_7  Forward Primer
aagctggtaagccagggaat

SEQ ID NO: 27317 - DNA, 20 bp, Artificial Sequence
  Chr1p_7  Forward Primer
ttcacaagctcccatgtctg

SEQ ID NO: 27318 - DNA, 19 bp, Artificial Sequence
  Chr1p_7  Forward Primer
tagacgtgttccctgcctg

SEQ ID NO: 27319 - DNA, 20 bp, Artificial Sequence
  Chr1p_7  Forward Primer
cccagaggaagaaacagcac

SEQ ID NO: 27320 - DNA, 20 bp, Artificial Sequence
  Chr1p_7  Forward Primer
cagtgttcgtgggagcttta

SEQ ID NO: 27321 - DNA, 20 bp, Artificial Sequence
  Chr1p_7  Forward Primer
gaaggcacagtgagtgacca

SEQ ID NO: 27322 - DNA, 20 bp, Artificial Sequence
  Chr1p_7  Forward Primer
gggtgatgatgagagcacct

SEQ ID NO: 27323 - DNA, 20 bp, Artificial Sequence
  Chr1p_7  Forward Primer
gctcccggtatcaagatgag

SEQ ID NO: 27324 - DNA, 20 bp, Artificial Sequence
  Chr1p_7  Forward Primer
aaaatagcacgaatgcggtc

SEQ ID NO: 27325 - DNA, 20 bp, Artificial Sequence
  Chr1p_7  Forward Primer
gtggtaaggattgggaagca

SEQ ID NO: 27326 - DNA, 20 bp, Artificial Sequence
  Chr1p_7  Forward Primer
atgtgccagagcagtgattg

SEQ ID NO: 27327 - DNA, 22 bp, Artificial Sequence
  Chr1p_7  Forward Primer
gctctcacaggaggaagttagc

SEQ ID NO: 27328 - DNA, 20 bp, Artificial Sequence
  Chr1p_7  Forward Primer
aggtgctttgttttggcaac

SEQ ID NO: 27329 - DNA, 20 bp, Artificial Sequence
  Chr1p_7  Reverse Primer
caccgcctgtttctcttttc

SEQ ID NO: 27330 - DNA, 24 bp, Artificial Sequence
  Chr1p_7  Reverse Primer
tctgagattactcttggaactccc

SEQ ID NO: 27331 - DNA, 20 bp, Artificial Sequence
  Chr1p_7  Reverse Primer
tgttgggctcactcactgtt

SEQ ID NO: 27332 - DNA, 20 bp, Artificial Sequence
  Chr1p_7  Reverse Primer
cgagaacattgaaggcatga

SEQ ID NO: 27333 - DNA, 20 bp, Artificial Sequence
  Chr1p_7  Reverse Primer
aggcattgaacaactccacc

SEQ ID NO: 27334 - DNA, 20 bp, Artificial Sequence
  Chr1p_7  Reverse Primer
atgctagcaagaacggatgg

SEQ ID NO: 27335 - DNA, 20 bp, Artificial Sequence
  Chr1p_7  Reverse Primer
ttgcagcttctcaaccaatc

SEQ ID NO: 27336 - DNA, 20 bp, Artificial Sequence
  Chr1p_7  Reverse Primer
tattttgcgattcatggctg

SEQ ID NO: 27337 - DNA, 20 bp, Artificial Sequence
  Chr1p_7  Reverse Primer
tttttctttcctcccccact

SEQ ID NO: 27338 - DNA, 20 bp, Artificial Sequence
  Chr1p_7  Reverse Primer
tcaggatttgaatccagggt

SEQ ID NO: 27339 - DNA, 20 bp, Artificial Sequence
  Chr1p_7  Reverse Primer
aagcagagaccaaagcctgt

SEQ ID NO: 27340 - DNA, 20 bp, Artificial Sequence
  Chr1p_7  Reverse Primer
tctcttgccctcagcaattt

SEQ ID NO: 27341 - DNA, 20 bp, Artificial Sequence
  Chr1p_7  Reverse Primer
acatccaagtttcctgctcg

SEQ ID NO: 27342 - DNA, 20 bp, Artificial Sequence
  Chr1p_7  Reverse Primer
aaaacgctccaaacaaccac

SEQ ID NO: 27343 - DNA, 22 bp, Artificial Sequence
  Chr1p_7  Reverse Primer
tggaaaacaactggatatgtca

SEQ ID NO: 27344 - DNA, 20 bp, Artificial Sequence
  Chr1p_7  Reverse Primer
cttgactctagctggtgccc

SEQ ID NO: 27345 - DNA, 20 bp, Artificial Sequence
  Chr1p_7  Reverse Primer
ttatcaccttggcctgcttt

SEQ ID NO: 27346 - DNA, 20 bp, Artificial Sequence
  Chr1p_7  Reverse Primer
taaggcacaatcatgggatg

SEQ ID NO: 27347 - DNA, 23 bp, Artificial Sequence
  Chr1p_7  Reverse Primer
tttttccaataaatttgccttga

SEQ ID NO: 27348 - DNA, 20 bp, Artificial Sequence
  Chr1p_7  Reverse Primer
ccagggaaatttctttgctg

SEQ ID NO: 27349 - DNA, 20 bp, Artificial Sequence
  Chr1p_7  Reverse Primer
ggatgatgctgggaaaagaa

SEQ ID NO: 27350 - DNA, 20 bp, Artificial Sequence
  Chr1p_7  Reverse Primer
ggggaaagctctctggagtc

SEQ ID NO: 27351 - DNA, 20 bp, Artificial Sequence
  Chr1p_7  Reverse Primer
gggagaaattgggaacaggt

SEQ ID NO: 27352 - DNA, 20 bp, Artificial Sequence
  Chr1p_7  Reverse Primer
tttacatcatctcctggggc

SEQ ID NO: 27353 - DNA, 20 bp, Artificial Sequence
  Chr1p_7  Reverse Primer
gccattctcaccagcagatt

SEQ ID NO: 27354 - DNA, 20 bp, Artificial Sequence
  Chr1p_7  Reverse Primer
tttcagtgcatctccacagg

SEQ ID NO: 27355 - DNA, 20 bp, Artificial Sequence
  Chr1p_7  Reverse Primer
gatagagggcatggtgatgg

SEQ ID NO: 27356 - DNA, 20 bp, Artificial Sequence
  Chr1p_7  Reverse Primer
ttcagagacctctccttggc

SEQ ID NO: 27357 - DNA, 20 bp, Artificial Sequence
  Chr1p_7  Reverse Primer
tcttctctcctccccactga

SEQ ID NO: 27358 - DNA, 20 bp, Artificial Sequence
  Chr1p_7  Reverse Primer
ggctgaggaagagtctgtgg

SEQ ID NO: 27359 - DNA, 20 bp, Artificial Sequence
  Chr1p_7  Reverse Primer
gccctcctctgacttagggt

SEQ ID NO: 27360 - DNA, 20 bp, Artificial Sequence
  Chr1p_7  Reverse Primer
ccaaaccgctgttctatggt

SEQ ID NO: 27361 - DNA, 20 bp, Artificial Sequence
  Chr1p_7  Reverse Primer
agcccttcgaatgcttttct

SEQ ID NO: 27362 - DNA, 20 bp, Artificial Sequence
  Chr1p_7  Reverse Primer
tccagtgctattttcggtcc

SEQ ID NO: 27363 - DNA, 20 bp, Artificial Sequence
  Chr1p_7  Reverse Primer
gaccatgagccatccagact

SEQ ID NO: 27364 - DNA, 22 bp, Artificial Sequence
  Chr1p_7  Reverse Primer
ggcgattgctacattcctagtt

SEQ ID NO: 27365 - DNA, 20 bp, Artificial Sequence
  Chr1p_7  Reverse Primer
tcctgctgtctgaagctcct

SEQ ID NO: 27366 - DNA, 20 bp, Artificial Sequence
  Chr1p_7  Reverse Primer
tatggtgagtgagacggacg

SEQ ID NO: 27367 - DNA, 20 bp, Artificial Sequence
  Chr1p_7  Reverse Primer
tcatgaggggagaaagatgg

SEQ ID NO: 27368 - DNA, 20 bp, Artificial Sequence
  Chr1p_7  Reverse Primer
tttacgcagaggtcattccc

SEQ ID NO: 27369 - DNA, 20 bp, Artificial Sequence
  Chr1p_7  Reverse Primer
atcaggcatgatggcttttc

SEQ ID NO: 27370 - DNA, 22 bp, Artificial Sequence
  Chr1p_7  Reverse Primer
agcccacattttattctccaaa

SEQ ID NO: 27371 - DNA, 20 bp, Artificial Sequence
  Chr1p_7  Reverse Primer
ccctcaaaagcacatgaaca

SEQ ID NO: 27372 - DNA, 20 bp, Artificial Sequence
  Chr1p_7  Reverse Primer
ttcagattcttcccggtgtc

SEQ ID NO: 27373 - DNA, 20 bp, Artificial Sequence
  Chr1p_7  Reverse Primer
ttaccgttccacattccaca

SEQ ID NO: 27374 - DNA, 27 bp, Artificial Sequence
  Chr1p_7  Reverse Primer
aagaccatgtgaaatgttttctataat

SEQ ID NO: 27375 - DNA, 20 bp, Artificial Sequence
  Chr1p_7  Reverse Primer
ataaagaggcagagcgcaaa

SEQ ID NO: 27376 - DNA, 20 bp, Artificial Sequence
  Chr1p_7  Reverse Primer
tacttgtgtgcctctgcacc

SEQ ID NO: 27377 - DNA, 20 bp, Artificial Sequence
  Chr1p_7  Reverse Primer
cacaatacagtcccattggc

SEQ ID NO: 27378 - DNA, 20 bp, Artificial Sequence
  Chr1p_7  Reverse Primer
ctggcccaagcccttactat

SEQ ID NO: 27379 - DNA, 20 bp, Artificial Sequence
  Chr1p_7  Reverse Primer
tgtgggaagctatgtggtga

SEQ ID NO: 27380 - DNA, 20 bp, Artificial Sequence
  Chr1p_7  Reverse Primer
ggctctttgtattgccctga

SEQ ID NO: 27381 - DNA, 20 bp, Artificial Sequence
  Chr1p_7  Reverse Primer
ttatttgggggcatctcatc

SEQ ID NO: 27382 - DNA, 20 bp, Artificial Sequence
  Chr1p_7  Reverse Primer
agcattgttatgggctgagg

SEQ ID NO: 27383 - DNA, 20 bp, Artificial Sequence
  Chr1p_7  Reverse Primer
ggtgccttaaaaatggttgg

SEQ ID NO: 27384 - DNA, 20 bp, Artificial Sequence
  Chr1p_7  Reverse Primer
ccccattcttgccatactga

SEQ ID NO: 27385 - DNA, 20 bp, Artificial Sequence
  Chr1p_7  Reverse Primer
gacccagtgaggctgtgaat

SEQ ID NO: 27386 - DNA, 20 bp, Artificial Sequence
  Chr1p_7  Reverse Primer
ttcttgtctccctgaggcat

SEQ ID NO: 27387 - DNA, 21 bp, Artificial Sequence
  Chr1p_7  Reverse Primer
tccccaagtctttggattttt

SEQ ID NO: 27388 - DNA, 21 bp, Artificial Sequence
  Chr1p_7  Reverse Primer
tttctccaacacagatgctga

SEQ ID NO: 27389 - DNA, 20 bp, Artificial Sequence
  Chr1p_7  Reverse Primer
taccctgcccctctcctatt

SEQ ID NO: 27390 - DNA, 20 bp, Artificial Sequence
  Chr1p_7  Reverse Primer
tgttggattttatctgccca

SEQ ID NO: 27391 - DNA, 21 bp, Artificial Sequence
  Chr1p_7  Reverse Primer
gaatgatgattaccgaaagcg

SEQ ID NO: 27392 - DNA, 20 bp, Artificial Sequence
  Chr1p_7  Reverse Primer
gcccaagggaagctcattat

SEQ ID NO: 27393 - DNA, 20 bp, Artificial Sequence
  Chr1p_7  Reverse Primer
tggcaatacgataggcaatg

SEQ ID NO: 27394 - DNA, 20 bp, Artificial Sequence
  Chr1p_7  Reverse Primer
agttgctgtggtcctcaggt

SEQ ID NO: 27395 - DNA, 20 bp, Artificial Sequence
  Chr1p_7  Reverse Primer
ggaccagctggagagttgtc

SEQ ID NO: 27396 - DNA, 26 bp, Artificial Sequence
  Chr1p_7  Reverse Primer
tggccaaacagttagtctctattagt

SEQ ID NO: 27397 - DNA, 20 bp, Artificial Sequence
  Chr1p_7  Reverse Primer
taagaggcagcagtcccact

SEQ ID NO: 27398 - DNA, 20 bp, Artificial Sequence
  Chr1p_7  Reverse Primer
ccctccaaccttgtttctcc

SEQ ID NO: 27399 - DNA, 20 bp, Artificial Sequence
  Chr1p_7  Reverse Primer
gacccaacaagatgggagaa

SEQ ID NO: 27400 - DNA, 20 bp, Artificial Sequence
  Chr1p_7  Reverse Primer
actttcctatgtcccaggca

SEQ ID NO: 27401 - DNA, 23 bp, Artificial Sequence
  Chr1p_7  Reverse Primer
cattctccttccatctctctgtg

SEQ ID NO: 27402 - DNA, 20 bp, Artificial Sequence
  Chr1p_7  Reverse Primer
tggttccttccttggtgaat

SEQ ID NO: 27403 - DNA, 20 bp, Artificial Sequence
  Chr1p_7  Reverse Primer
caagctctgcttgcctgtaa

SEQ ID NO: 27404 - DNA, 20 bp, Artificial Sequence
  Chr1p_7  Reverse Primer
ttctaaaatggcccacttgc

SEQ ID NO: 27405 - DNA, 20 bp, Artificial Sequence
  Chr1p_7  Reverse Primer
cccctgtggaaaagttttgt

SEQ ID NO: 27406 - DNA, 20 bp, Artificial Sequence
  Chr1p_7  Reverse Primer
aagtgacattttgggttggg

SEQ ID NO: 27407 - DNA, 20 bp, Artificial Sequence
  Chr1p_7  Reverse Primer
gaggccaaactcaggctaca

SEQ ID NO: 27408 - DNA, 20 bp, Artificial Sequence
  Chr1p_7  Reverse Primer
gcagttcagcgttttcttca

SEQ ID NO: 27409 - DNA, 20 bp, Artificial Sequence
  Chr1p_7  Reverse Primer
tagtgggttatgggccatgt

SEQ ID NO: 27410 - DNA, 20 bp, Artificial Sequence
  Chr1p_7  Reverse Primer
caaatgaaggcagggatcat

SEQ ID NO: 27411 - DNA, 20 bp, Artificial Sequence
  Chr1p_7  Reverse Primer
ttcaggtccttgaacttgcc

SEQ ID NO: 27412 - DNA, 20 bp, Artificial Sequence
  Chr1p_7  Reverse Primer
cctcacttcccacatccagt

SEQ ID NO: 27413 - DNA, 20 bp, Artificial Sequence
  Chr1p_7  Reverse Primer
ccatgtccgtagagctgaga

SEQ ID NO: 27414 - DNA, 21 bp, Artificial Sequence
  Chr1p_7  Reverse Primer
ggtctttcaaggcttgtctca

SEQ ID NO: 27415 - DNA, 20 bp, Artificial Sequence
  Chr1p_7  Reverse Primer
tcttgttggtttgggcctac

SEQ ID NO: 27416 - DNA, 20 bp, Artificial Sequence
  Chr1p_7  Reverse Primer
caccagtttgccagagtgag

SEQ ID NO: 27417 - DNA, 20 bp, Artificial Sequence
  Chr1p_7  Reverse Primer
tttccttggaagcgttgact

SEQ ID NO: 27418 - DNA, 20 bp, Artificial Sequence
  Chr1p_7  Reverse Primer
acctcgttctcctttgagca

SEQ ID NO: 27419 - DNA, 20 bp, Artificial Sequence
  Chr1p_7  Reverse Primer
gcgtctgttgaaatcttgcc

SEQ ID NO: 27420 - DNA, 20 bp, Artificial Sequence
  Chr1p_7  Reverse Primer
tctccctcaacatccaaacc

SEQ ID NO: 27421 - DNA, 20 bp, Artificial Sequence
  Chr1p_7  Reverse Primer
cctgagcatgctatgtgctg

SEQ ID NO: 27422 - DNA, 20 bp, Artificial Sequence
  Chr1p_7  Reverse Primer
aggccaatgcaaaatgagtc

SEQ ID NO: 27423 - DNA, 20 bp, Artificial Sequence
  Chr1p_7  Reverse Primer
ccacaggctcaaagattctg

SEQ ID NO: 27424 - DNA, 20 bp, Artificial Sequence
  Chr1p_7  Reverse Primer
gcatctcacttcccagaagg

SEQ ID NO: 27425 - DNA, 22 bp, Artificial Sequence
  Chr1p_8  Forward Primer
gcccatggtacattaactggag

SEQ ID NO: 27426 - DNA, 20 bp, Artificial Sequence
  Chr1p_8  Forward Primer
agcacatgaaggcataccaa

SEQ ID NO: 27427 - DNA, 23 bp, Artificial Sequence
  Chr1p_8  Forward Primer
caagttttcattttgaactctgc

SEQ ID NO: 27428 - DNA, 20 bp, Artificial Sequence
  Chr1p_8  Forward Primer
aggaaaggcaccatcacatt

SEQ ID NO: 27429 - DNA, 22 bp, Artificial Sequence
  Chr1p_8  Forward Primer
tgcacaaagcagttacttcaca

SEQ ID NO: 27430 - DNA, 20 bp, Artificial Sequence
  Chr1p_8  Forward Primer
atttctgggtttaaacgggc

SEQ ID NO: 27431 - DNA, 21 bp, Artificial Sequence
  Chr1p_8  Forward Primer
cagctgaaacgtaaggctctg

SEQ ID NO: 27432 - DNA, 20 bp, Artificial Sequence
  Chr1p_8  Forward Primer
cgtgaggtctggaggcttta

SEQ ID NO: 27433 - DNA, 21 bp, Artificial Sequence
  Chr1p_8  Forward Primer
gggtgaccatttagattggct

SEQ ID NO: 27434 - DNA, 20 bp, Artificial Sequence
  Chr1p_8  Forward Primer
gaaaattggggagggaaaag

SEQ ID NO: 27435 - DNA, 22 bp, Artificial Sequence
  Chr1p_8  Forward Primer
tgacttctgactttgatgtggc

SEQ ID NO: 27436 - DNA, 20 bp, Artificial Sequence
  Chr1p_8  Forward Primer
tgaaatcgaagcccagaatc

SEQ ID NO: 27437 - DNA, 21 bp, Artificial Sequence
  Chr1p_8  Forward Primer
tgcttttattcaggccatttc

SEQ ID NO: 27438 - DNA, 21 bp, Artificial Sequence
  Chr1p_8  Forward Primer
aatctcagacgctttgcagtt

SEQ ID NO: 27439 - DNA, 20 bp, Artificial Sequence
  Chr1p_8  Forward Primer
caagggacttgggaacctct

SEQ ID NO: 27440 - DNA, 20 bp, Artificial Sequence
  Chr1p_8  Forward Primer
ggagaacgtggattgctcat

SEQ ID NO: 27441 - DNA, 20 bp, Artificial Sequence
  Chr1p_8  Forward Primer
cacttgctgtgggaagtctg

SEQ ID NO: 27442 - DNA, 20 bp, Artificial Sequence
  Chr1p_8  Forward Primer
gccccagtgctttcttgata

SEQ ID NO: 27443 - DNA, 20 bp, Artificial Sequence
  Chr1p_8  Forward Primer
atatggacaaggaagggcag

SEQ ID NO: 27444 - DNA, 21 bp, Artificial Sequence
  Chr1p_8  Forward Primer
gatgctttgaactgaagtggc

SEQ ID NO: 27445 - DNA, 20 bp, Artificial Sequence
  Chr1p_8  Forward Primer
tattcctgcctttttggtgg

SEQ ID NO: 27446 - DNA, 20 bp, Artificial Sequence
  Chr1p_8  Forward Primer
agtggccaggaagaactgaa

SEQ ID NO: 27447 - DNA, 21 bp, Artificial Sequence
  Chr1p_8  Forward Primer
tctgaatcaccatcagcagaa

SEQ ID NO: 27448 - DNA, 20 bp, Artificial Sequence
  Chr1p_8  Forward Primer
tgctggatttgtgttaagcc

SEQ ID NO: 27449 - DNA, 20 bp, Artificial Sequence
  Chr1p_8  Forward Primer
gggtgatttccaggtcactg

SEQ ID NO: 27450 - DNA, 23 bp, Artificial Sequence
  Chr1p_8  Forward Primer
tgaaggaaagggagattagatca

SEQ ID NO: 27451 - DNA, 24 bp, Artificial Sequence
  Chr1p_8  Forward Primer
aggcagagactaacagtaggcttc

SEQ ID NO: 27452 - DNA, 20 bp, Artificial Sequence
  Chr1p_8  Forward Primer
aattgccctctgtgttccag

SEQ ID NO: 27453 - DNA, 20 bp, Artificial Sequence
  Chr1p_8  Forward Primer
cccaagcatgcagtctacaa

SEQ ID NO: 27454 - DNA, 20 bp, Artificial Sequence
  Chr1p_8  Forward Primer
aatgtgtggcttatttgccc

SEQ ID NO: 27455 - DNA, 20 bp, Artificial Sequence
  Chr1p_8  Forward Primer
ggagccaggcactttatgtc

SEQ ID NO: 27456 - DNA, 23 bp, Artificial Sequence
  Chr1p_8  Forward Primer
aaacacatggagatggtatggtt

SEQ ID NO: 27457 - DNA, 20 bp, Artificial Sequence
  Chr1p_8  Forward Primer
atggagtgtgtttctggcct

SEQ ID NO: 27458 - DNA, 20 bp, Artificial Sequence
  Chr1p_8  Forward Primer
taaagctgaaagcgcacaga

SEQ ID NO: 27459 - DNA, 20 bp, Artificial Sequence
  Chr1p_8  Forward Primer
tggtgatatgtggcagccta

SEQ ID NO: 27460 - DNA, 20 bp, Artificial Sequence
  Chr1p_8  Forward Primer
attctgcccgttttaggaaa

SEQ ID NO: 27461 - DNA, 20 bp, Artificial Sequence
  Chr1p_8  Forward Primer
ggccagagcataggtgaaat

SEQ ID NO: 27462 - DNA, 21 bp, Artificial Sequence
  Chr1p_8  Forward Primer
gaacatcagaatggccaaaaa

SEQ ID NO: 27463 - DNA, 20 bp, Artificial Sequence
  Chr1p_8  Forward Primer
tacgtgctcaaaccattgga

SEQ ID NO: 27464 - DNA, 20 bp, Artificial Sequence
  Chr1p_8  Forward Primer
ctcaagtcacattttggcct

SEQ ID NO: 27465 - DNA, 26 bp, Artificial Sequence
  Chr1p_8  Forward Primer
tcactacagagacaagcacattaaga

SEQ ID NO: 27466 - DNA, 20 bp, Artificial Sequence
  Chr1p_8  Forward Primer
aattggtatgctgaggccag

SEQ ID NO: 27467 - DNA, 20 bp, Artificial Sequence
  Chr1p_8  Forward Primer
gcctcaatctgggagaaaca

SEQ ID NO: 27468 - DNA, 27 bp, Artificial Sequence
  Chr1p_8  Forward Primer
tttgaattatacatgagaaggacagaa

SEQ ID NO: 27469 - DNA, 20 bp, Artificial Sequence
  Chr1p_8  Forward Primer
tgttccacctgtgtagtggg

SEQ ID NO: 27470 - DNA, 22 bp, Artificial Sequence
  Chr1p_8  Forward Primer
tttggaggaataaagggtttca

SEQ ID NO: 27471 - DNA, 20 bp, Artificial Sequence
  Chr1p_8  Forward Primer
aggcctgtgtagctggatca

SEQ ID NO: 27472 - DNA, 20 bp, Artificial Sequence
  Chr1p_8  Forward Primer
cggttgaatctaaccaggga

SEQ ID NO: 27473 - DNA, 21 bp, Artificial Sequence
  Chr1p_8  Forward Primer
ttgcttatgcagctttcttcc

SEQ ID NO: 27474 - DNA, 20 bp, Artificial Sequence
  Chr1p_8  Forward Primer
gctcatgttcaggaagcaaa

SEQ ID NO: 27475 - DNA, 20 bp, Artificial Sequence
  Chr1p_8  Forward Primer
gccatggaagataaaggggt

SEQ ID NO: 27476 - DNA, 20 bp, Artificial Sequence
  Chr1p_8  Forward Primer
cacagaaactgctctggcaa

SEQ ID NO: 27477 - DNA, 21 bp, Artificial Sequence
  Chr1p_8  Forward Primer
tggctgaaactatcacctcca

SEQ ID NO: 27478 - DNA, 20 bp, Artificial Sequence
  Chr1p_8  Forward Primer
atccttgcaactcccttcct

SEQ ID NO: 27479 - DNA, 20 bp, Artificial Sequence
  Chr1p_8  Forward Primer
tccaaaaccaggatacagcc

SEQ ID NO: 27480 - DNA, 20 bp, Artificial Sequence
  Chr1p_8  Forward Primer
caaagttctgccccagaaag

SEQ ID NO: 27481 - DNA, 21 bp, Artificial Sequence
  Chr1p_8  Forward Primer
ggttccagtcctactcaccct

SEQ ID NO: 27482 - DNA, 25 bp, Artificial Sequence
  Chr1p_8  Forward Primer
gattttcacatttgcctttattaac

SEQ ID NO: 27483 - DNA, 22 bp, Artificial Sequence
  Chr1p_8  Forward Primer
tttttctttactttgccgtgtt

SEQ ID NO: 27484 - DNA, 20 bp, Artificial Sequence
  Chr1p_8  Forward Primer
catggcaagcaatgtttttc

SEQ ID NO: 27485 - DNA, 26 bp, Artificial Sequence
  Chr1p_8  Forward Primer
caatatttgcatttttcagagatagc

SEQ ID NO: 27486 - DNA, 20 bp, Artificial Sequence
  Chr1p_8  Forward Primer
gccttttacccgatccttgt

SEQ ID NO: 27487 - DNA, 20 bp, Artificial Sequence
  Chr1p_8  Forward Primer
tttgggagcaaagtttccat

SEQ ID NO: 27488 - DNA, 20 bp, Artificial Sequence
  Chr1p_8  Forward Primer
attccttgttggccattgaa

SEQ ID NO: 27489 - DNA, 20 bp, Artificial Sequence
  Chr1p_8  Forward Primer
ggcgagagtatgtctgggtc

SEQ ID NO: 27490 - DNA, 20 bp, Artificial Sequence
  Chr1p_8  Forward Primer
ctggacttcagcatgggatt

SEQ ID NO: 27491 - DNA, 24 bp, Artificial Sequence
  Chr1p_8  Forward Primer
acaagtcttttcaaagcaaataca

SEQ ID NO: 27492 - DNA, 20 bp, Artificial Sequence
  Chr1p_8  Forward Primer
ccccaagtttattgcaaagg

SEQ ID NO: 27493 - DNA, 22 bp, Artificial Sequence
  Chr1p_8  Forward Primer
tgcagattaaaatgagcagtca

SEQ ID NO: 27494 - DNA, 20 bp, Artificial Sequence
  Chr1p_8  Forward Primer
aaccagtttcattgccttgc

SEQ ID NO: 27495 - DNA, 20 bp, Artificial Sequence
  Chr1p_8  Forward Primer
tatctgaaggcacagccaca

SEQ ID NO: 27496 - DNA, 20 bp, Artificial Sequence
  Chr1p_8  Forward Primer
ttgcaaagctgactttgtgg

SEQ ID NO: 27497 - DNA, 20 bp, Artificial Sequence
  Chr1p_8  Forward Primer
agccacagctagaagctcca

SEQ ID NO: 27498 - DNA, 20 bp, Artificial Sequence
  Chr1p_8  Forward Primer
tgacatccatttcttcagca

SEQ ID NO: 27499 - DNA, 20 bp, Artificial Sequence
  Chr1p_8  Forward Primer
cacagcccaacccactaact

SEQ ID NO: 27500 - DNA, 22 bp, Artificial Sequence
  Chr1p_8  Forward Primer
gccatcagcactgattgttaag

SEQ ID NO: 27501 - DNA, 20 bp, Artificial Sequence
  Chr1p_8  Forward Primer
gtgagggaggcattctcaaa

SEQ ID NO: 27502 - DNA, 23 bp, Artificial Sequence
  Chr1p_8  Forward Primer
agaattccaagatgttgtgtgaa

SEQ ID NO: 27503 - DNA, 21 bp, Artificial Sequence
  Chr1p_8  Forward Primer
cgagtgtgaaaaatcgacaca

SEQ ID NO: 27504 - DNA, 20 bp, Artificial Sequence
  Chr1p_8  Forward Primer
aatcgagtcaagccaaggaa

SEQ ID NO: 27505 - DNA, 20 bp, Artificial Sequence
  Chr1p_8  Forward Primer
tagtcagccttccaggcttc

SEQ ID NO: 27506 - DNA, 24 bp, Artificial Sequence
  Chr1p_8  Forward Primer
tctgtaaagttccagttatcgtga

SEQ ID NO: 27507 - DNA, 20 bp, Artificial Sequence
  Chr1p_8  Forward Primer
ttgttgcatgcttgtctgaa

SEQ ID NO: 27508 - DNA, 21 bp, Artificial Sequence
  Chr1p_8  Forward Primer
tcctctcagttggcagaaaaa

SEQ ID NO: 27509 - DNA, 20 bp, Artificial Sequence
  Chr1p_8  Forward Primer
tcttagccccaaggggtatc

SEQ ID NO: 27510 - DNA, 20 bp, Artificial Sequence
  Chr1p_8  Forward Primer
atgtcaagcctccctgactg

SEQ ID NO: 27511 - DNA, 20 bp, Artificial Sequence
  Chr1p_8  Forward Primer
aagcgttggggacatgatag

SEQ ID NO: 27512 - DNA, 20 bp, Artificial Sequence
  Chr1p_8  Forward Primer
gtggaaggggcttacaaaca

SEQ ID NO: 27513 - DNA, 20 bp, Artificial Sequence
  Chr1p_8  Forward Primer
gaaacaccgacaggcttcat

SEQ ID NO: 27514 - DNA, 25 bp, Artificial Sequence
  Chr1p_8  Forward Primer
tggaaaacatagaattacgttcaaa

SEQ ID NO: 27515 - DNA, 20 bp, Artificial Sequence
  Chr1p_8  Forward Primer
tgcactttcacaggtcttgg

SEQ ID NO: 27516 - DNA, 20 bp, Artificial Sequence
  Chr1p_8  Forward Primer
ttgcatctctggccttgaat

SEQ ID NO: 27517 - DNA, 24 bp, Artificial Sequence
  Chr1p_8  Forward Primer
ggtgaatgaagaagtgaaatctga

SEQ ID NO: 27518 - DNA, 21 bp, Artificial Sequence
  Chr1p_8  Forward Primer
ggtctgctttccttcaagtca

SEQ ID NO: 27519 - DNA, 25 bp, Artificial Sequence
  Chr1p_8  Forward Primer
cagaaggtccatttgtattgtattc

SEQ ID NO: 27520 - DNA, 20 bp, Artificial Sequence
  Chr1p_8  Forward Primer
atgggaatgaagacccactg

SEQ ID NO: 27521 - DNA, 22 bp, Artificial Sequence
  Chr1p_8  Reverse Primer
aatttgaccactggaagtatgc

SEQ ID NO: 27522 - DNA, 21 bp, Artificial Sequence
  Chr1p_8  Reverse Primer
gacatcagtcaatggtgcctt

SEQ ID NO: 27523 - DNA, 21 bp, Artificial Sequence
  Chr1p_8  Reverse Primer
tttgcgaagcaaataaacaca

SEQ ID NO: 27524 - DNA, 21 bp, Artificial Sequence
  Chr1p_8  Reverse Primer
tggtgatgttgttgttgttgc

SEQ ID NO: 27525 - DNA, 20 bp, Artificial Sequence
  Chr1p_8  Reverse Primer
aaagctccaaaatatggcct

SEQ ID NO: 27526 - DNA, 20 bp, Artificial Sequence
  Chr1p_8  Reverse Primer
ttcccagaatctcaacagcc

SEQ ID NO: 27527 - DNA, 20 bp, Artificial Sequence
  Chr1p_8  Reverse Primer
aatgcctagcaattggcaac

SEQ ID NO: 27528 - DNA, 20 bp, Artificial Sequence
  Chr1p_8  Reverse Primer
cagaagccgaggtgctatgt

SEQ ID NO: 27529 - DNA, 20 bp, Artificial Sequence
  Chr1p_8  Reverse Primer
aaccagaggcaatgtcatca

SEQ ID NO: 27530 - DNA, 20 bp, Artificial Sequence
  Chr1p_8  Reverse Primer
catggaatcagaaggggaga

SEQ ID NO: 27531 - DNA, 23 bp, Artificial Sequence
  Chr1p_8  Reverse Primer
ttgtcatctgcctaggacttagc

SEQ ID NO: 27532 - DNA, 20 bp, Artificial Sequence
  Chr1p_8  Reverse Primer
aacaacaaagcatgcagcag

SEQ ID NO: 27533 - DNA, 20 bp, Artificial Sequence
  Chr1p_8  Reverse Primer
tgtcagtttcctaagcccca

SEQ ID NO: 27534 - DNA, 23 bp, Artificial Sequence
  Chr1p_8  Reverse Primer
ttcatttctctctcctctcctca

SEQ ID NO: 27535 - DNA, 20 bp, Artificial Sequence
  Chr1p_8  Reverse Primer
accccaaatgaatagggacc

SEQ ID NO: 27536 - DNA, 20 bp, Artificial Sequence
  Chr1p_8  Reverse Primer
ctactgctttggttggaggc

SEQ ID NO: 27537 - DNA, 19 bp, Artificial Sequence
  Chr1p_8  Reverse Primer
gtgcccaactgggaaagat

SEQ ID NO: 27538 - DNA, 20 bp, Artificial Sequence
  Chr1p_8  Reverse Primer
atgatcagctcctgccagtt

SEQ ID NO: 27539 - DNA, 20 bp, Artificial Sequence
  Chr1p_8  Reverse Primer
cccactggcctttacctaca

SEQ ID NO: 27540 - DNA, 20 bp, Artificial Sequence
  Chr1p_8  Reverse Primer
agtggcaagtgacaaaaccc

SEQ ID NO: 27541 - DNA, 20 bp, Artificial Sequence
  Chr1p_8  Reverse Primer
gctttttgaagattgcagcc

SEQ ID NO: 27542 - DNA, 23 bp, Artificial Sequence
  Chr1p_8  Reverse Primer
caaaggagagttcagcaaagaga

SEQ ID NO: 27543 - DNA, 21 bp, Artificial Sequence
  Chr1p_8  Reverse Primer
ggaaagaagtatcgcagcctt

SEQ ID NO: 27544 - DNA, 20 bp, Artificial Sequence
  Chr1p_8  Reverse Primer
atactgtcaccagccccaga

SEQ ID NO: 27545 - DNA, 21 bp, Artificial Sequence
  Chr1p_8  Reverse Primer
ccccaaagacatttatgagca

SEQ ID NO: 27546 - DNA, 22 bp, Artificial Sequence
  Chr1p_8  Reverse Primer
tcagatatgcttgtgccaattt

SEQ ID NO: 27547 - DNA, 21 bp, Artificial Sequence
  Chr1p_8  Reverse Primer
aagtggacttgcaaggaaatg

SEQ ID NO: 27548 - DNA, 20 bp, Artificial Sequence
  Chr1p_8  Reverse Primer
agtctcatgctgtgttggga

SEQ ID NO: 27549 - DNA, 20 bp, Artificial Sequence
  Chr1p_8  Reverse Primer
tcaggggaggaggaatctat

SEQ ID NO: 27550 - DNA, 20 bp, Artificial Sequence
  Chr1p_8  Reverse Primer
ttgctgcaacacaaaccaat

SEQ ID NO: 27551 - DNA, 20 bp, Artificial Sequence
  Chr1p_8  Reverse Primer
ccagctttagcatgccacta

SEQ ID NO: 27552 - DNA, 20 bp, Artificial Sequence
  Chr1p_8  Reverse Primer
atccctccctttctttccaa

SEQ ID NO: 27553 - DNA, 19 bp, Artificial Sequence
  Chr1p_8  Reverse Primer
ggctgcccaaagcatattt

SEQ ID NO: 27554 - DNA, 20 bp, Artificial Sequence
  Chr1p_8  Reverse Primer
ggaaccaaacagcctctgaa

SEQ ID NO: 27555 - DNA, 20 bp, Artificial Sequence
  Chr1p_8  Reverse Primer
aggcttgactctgctggaaa

SEQ ID NO: 27556 - DNA, 22 bp, Artificial Sequence
  Chr1p_8  Reverse Primer
ttgcataatcttcggttccttt

SEQ ID NO: 27557 - DNA, 20 bp, Artificial Sequence
  Chr1p_8  Reverse Primer
gggaaaagactgaaaatggc

SEQ ID NO: 27558 - DNA, 20 bp, Artificial Sequence
  Chr1p_8  Reverse Primer
cgcttctgtgctgtgatttc

SEQ ID NO: 27559 - DNA, 20 bp, Artificial Sequence
  Chr1p_8  Reverse Primer
tgccaacatttccagtcaaa

SEQ ID NO: 27560 - DNA, 20 bp, Artificial Sequence
  Chr1p_8  Reverse Primer
tagctcaagagcactgctgg

SEQ ID NO: 27561 - DNA, 24 bp, Artificial Sequence
  Chr1p_8  Reverse Primer
cctttcagctgtaatgttttcaga

SEQ ID NO: 27562 - DNA, 20 bp, Artificial Sequence
  Chr1p_8  Reverse Primer
gaagggaaaggaagctttgg

SEQ ID NO: 27563 - DNA, 20 bp, Artificial Sequence
  Chr1p_8  Reverse Primer
agcagcactggtcctttgat

SEQ ID NO: 27564 - DNA, 20 bp, Artificial Sequence
  Chr1p_8  Reverse Primer
ttgaatcgagcagatccaag

SEQ ID NO: 27565 - DNA, 20 bp, Artificial Sequence
  Chr1p_8  Reverse Primer
ttacatagcggccttgaagc

SEQ ID NO: 27566 - DNA, 20 bp, Artificial Sequence
  Chr1p_8  Reverse Primer
gggagagacgataaccagca

SEQ ID NO: 27567 - DNA, 20 bp, Artificial Sequence
  Chr1p_8  Reverse Primer
ggggttttcattttggttga

SEQ ID NO: 27568 - DNA, 20 bp, Artificial Sequence
  Chr1p_8  Reverse Primer
atgctttatgcagtcagggc

SEQ ID NO: 27569 - DNA, 20 bp, Artificial Sequence
  Chr1p_8  Reverse Primer
cctgccatctatgggttcaa

SEQ ID NO: 27570 - DNA, 20 bp, Artificial Sequence
  Chr1p_8  Reverse Primer
gggaagagaaggaaaggcag

SEQ ID NO: 27571 - DNA, 20 bp, Artificial Sequence
  Chr1p_8  Reverse Primer
tccctgatccgcaaagatac

SEQ ID NO: 27572 - DNA, 20 bp, Artificial Sequence
  Chr1p_8  Reverse Primer
gcaagcaaattcagtgtgga

SEQ ID NO: 27573 - DNA, 22 bp, Artificial Sequence
  Chr1p_8  Reverse Primer
tttgcatgaaattagccagaat

SEQ ID NO: 27574 - DNA, 23 bp, Artificial Sequence
  Chr1p_8  Reverse Primer
caaacagatttggtttccaaaag

SEQ ID NO: 27575 - DNA, 21 bp, Artificial Sequence
  Chr1p_8  Reverse Primer
ggaagaaagagagaggcaagc

SEQ ID NO: 27576 - DNA, 20 bp, Artificial Sequence
  Chr1p_8  Reverse Primer
aaacagtcaagcaagcaacg

SEQ ID NO: 27577 - DNA, 21 bp, Artificial Sequence
  Chr1p_8  Reverse Primer
ttctcacaaaatccaaagagc

SEQ ID NO: 27578 - DNA, 22 bp, Artificial Sequence
  Chr1p_8  Reverse Primer
gaaaaattaggaacaaatgcca

SEQ ID NO: 27579 - DNA, 21 bp, Artificial Sequence
  Chr1p_8  Reverse Primer
tgcttgcttaagttccttcca

SEQ ID NO: 27580 - DNA, 20 bp, Artificial Sequence
  Chr1p_8  Reverse Primer
gttttgcagaaatggggatg

SEQ ID NO: 27581 - DNA, 24 bp, Artificial Sequence
  Chr1p_8  Reverse Primer
ttgcagccacaaaatattcttaat

SEQ ID NO: 27582 - DNA, 20 bp, Artificial Sequence
  Chr1p_8  Reverse Primer
ggggtagccagaatttcaca

SEQ ID NO: 27583 - DNA, 20 bp, Artificial Sequence
  Chr1p_8  Reverse Primer
caacaagctaggcacaacca

SEQ ID NO: 27584 - DNA, 20 bp, Artificial Sequence
  Chr1p_8  Reverse Primer
cagctgacatgcaacctcac

SEQ ID NO: 27585 - DNA, 21 bp, Artificial Sequence
  Chr1p_8  Reverse Primer
tgtgacagtgatgggactcaa

SEQ ID NO: 27586 - DNA, 24 bp, Artificial Sequence
  Chr1p_8  Reverse Primer
cctaaatgaggaaggaagaatctg

SEQ ID NO: 27587 - DNA, 20 bp, Artificial Sequence
  Chr1p_8  Reverse Primer
ttgaagaggtgactgaagcg

SEQ ID NO: 27588 - DNA, 20 bp, Artificial Sequence
  Chr1p_8  Reverse Primer
ctaaattcaggtgcaagcca

SEQ ID NO: 27589 - DNA, 21 bp, Artificial Sequence
  Chr1p_8  Reverse Primer
tccatgatattttatgcccca

SEQ ID NO: 27590 - DNA, 20 bp, Artificial Sequence
  Chr1p_8  Reverse Primer
tgggtctagccagttgaagg

SEQ ID NO: 27591 - DNA, 20 bp, Artificial Sequence
  Chr1p_8  Reverse Primer
gggaagaaaattacctcggg

SEQ ID NO: 27592 - DNA, 20 bp, Artificial Sequence
  Chr1p_8  Reverse Primer
gttgcccagtcttgtcccta

SEQ ID NO: 27593 - DNA, 20 bp, Artificial Sequence
  Chr1p_8  Reverse Primer
ggcaggggctataagaaagc

SEQ ID NO: 27594 - DNA, 20 bp, Artificial Sequence
  Chr1p_8  Reverse Primer
aagccagaagggagaagagg

SEQ ID NO: 27595 - DNA, 20 bp, Artificial Sequence
  Chr1p_8  Reverse Primer
atgttgctgcaggcttttct

SEQ ID NO: 27596 - DNA, 22 bp, Artificial Sequence
  Chr1p_8  Reverse Primer
ggaatgaagtctttctgaggct

SEQ ID NO: 27597 - DNA, 23 bp, Artificial Sequence
  Chr1p_8  Reverse Primer
tgctgacattaacattccttgtc

SEQ ID NO: 27598 - DNA, 25 bp, Artificial Sequence
  Chr1p_8  Reverse Primer
tggtccttgaggtaataactatgtc

SEQ ID NO: 27599 - DNA, 21 bp, Artificial Sequence
  Chr1p_8  Reverse Primer
ttcggagggtaccagtagtca

SEQ ID NO: 27600 - DNA, 20 bp, Artificial Sequence
  Chr1p_8  Reverse Primer
gctgctctaaaagcctgcac

SEQ ID NO: 27601 - DNA, 22 bp, Artificial Sequence
  Chr1p_8  Reverse Primer
tgcatttttcttccattcttga

SEQ ID NO: 27602 - DNA, 21 bp, Artificial Sequence
  Chr1p_8  Reverse Primer
aaatcaaccttgaaccttgcc

SEQ ID NO: 27603 - DNA, 25 bp, Artificial Sequence
  Chr1p_8  Reverse Primer
aggaaaaagactctatcattgaaca

SEQ ID NO: 27604 - DNA, 20 bp, Artificial Sequence
  Chr1p_8  Reverse Primer
tcctcctcctccctttcact

SEQ ID NO: 27605 - DNA, 20 bp, Artificial Sequence
  Chr1p_8  Reverse Primer
aagggaatatcctcccatgc

SEQ ID NO: 27606 - DNA, 20 bp, Artificial Sequence
  Chr1p_8  Reverse Primer
tgctcaattctggcttctca

SEQ ID NO: 27607 - DNA, 20 bp, Artificial Sequence
  Chr1p_8  Reverse Primer
tcagtctccttggggatgtc

SEQ ID NO: 27608 - DNA, 20 bp, Artificial Sequence
  Chr1p_8  Reverse Primer
tcctcacaacagagggtggt

SEQ ID NO: 27609 - DNA, 20 bp, Artificial Sequence
  Chr1p_8  Reverse Primer
aggctggaacacaggaagaa

SEQ ID NO: 27610 - DNA, 20 bp, Artificial Sequence
  Chr1p_8  Reverse Primer
gtatgcttgttggcagcttg

SEQ ID NO: 27611 - DNA, 20 bp, Artificial Sequence
  Chr1p_8  Reverse Primer
ggaactgaagagcacatgcc

SEQ ID NO: 27612 - DNA, 25 bp, Artificial Sequence
  Chr1p_8  Reverse Primer
ttgaaaaggaaagaaaagttcttga

SEQ ID NO: 27613 - DNA, 25 bp, Artificial Sequence
  Chr1p_8  Reverse Primer
acaagtttgattattcagaaaggac

SEQ ID NO: 27614 - DNA, 25 bp, Artificial Sequence
  Chr1p_8  Reverse Primer
caaggagtttaaggaattttcaaga

SEQ ID NO: 27615 - DNA, 20 bp, Artificial Sequence
  Chr1p_8  Reverse Primer
aggtaaagcagggatcagca

SEQ ID NO: 27616 - DNA, 20 bp, Artificial Sequence
  Chr1p_8  Reverse Primer
tggctttgcaaaatgttcac

SEQ ID NO: 27617 - DNA, 20 bp, Artificial Sequence
  Chr1p_9 Forward Primer
gctgatgggggatacagaaa

SEQ ID NO: 27618 - DNA, 20 bp, Artificial Sequence
  Chr1p_9 Forward Primer
caaaatgctgggttcaacaa

SEQ ID NO: 27619 - DNA, 20 bp, Artificial Sequence
  Chr1p_9 Forward Primer
ggttttgctaatccttggct

SEQ ID NO: 27620 - DNA, 20 bp, Artificial Sequence
  Chr1p_9 Forward Primer
gggataaagaagctgtcccc

SEQ ID NO: 27621 - DNA, 23 bp, Artificial Sequence
  Chr1p_9 Forward Primer
aaatactggttggagaagacaca

SEQ ID NO: 27622 - DNA, 22 bp, Artificial Sequence
  Chr1p_9 Forward Primer
ttgcaaaataagcctaagggaa

SEQ ID NO: 27623 - DNA, 20 bp, Artificial Sequence
  Chr1p_9 Forward Primer
tgaagcccagcctctagtgt

SEQ ID NO: 27624 - DNA, 20 bp, Artificial Sequence
  Chr1p_9 Forward Primer
gggaccttcactagcagcag

SEQ ID NO: 27625 - DNA, 27 bp, Artificial Sequence
  Chr1p_9 Forward Primer
tcctacattaaacataaaactatggca

SEQ ID NO: 27626 - DNA, 20 bp, Artificial Sequence
  Chr1p_9 Forward Primer
ctgctgaggtcacgaacttg

SEQ ID NO: 27627 - DNA, 20 bp, Artificial Sequence
  Chr1p_9 Forward Primer
gggaagcatattttggcatt

SEQ ID NO: 27628 - DNA, 21 bp, Artificial Sequence
  Chr1p_9 Forward Primer
tatctcaacccctttcccttc

SEQ ID NO: 27629 - DNA, 20 bp, Artificial Sequence
  Chr1p_9 Forward Primer
atgacagcctccaaggacag

SEQ ID NO: 27630 - DNA, 20 bp, Artificial Sequence
  Chr1p_9 Forward Primer
gttggatcccatgtttgtcc

SEQ ID NO: 27631 - DNA, 20 bp, Artificial Sequence
  Chr1p_9 Forward Primer
gggacaggcactatctctgc

SEQ ID NO: 27632 - DNA, 20 bp, Artificial Sequence
  Chr1p_9 Forward Primer
cactttcctttcccaaacca

SEQ ID NO: 27633 - DNA, 22 bp, Artificial Sequence
  Chr1p_9 Forward Primer
cagtaagaaaaggtgcaaacca

SEQ ID NO: 27634 - DNA, 20 bp, Artificial Sequence
  Chr1p_9 Forward Primer
ttgttaaacgaccctcccac

SEQ ID NO: 27635 - DNA, 20 bp, Artificial Sequence
  Chr1p_9 Forward Primer
aatctgatgcttccaccacc

SEQ ID NO: 27636 - DNA, 21 bp, Artificial Sequence
  Chr1p_9 Forward Primer
tcttgttaatgccaaggatgc

SEQ ID NO: 27637 - DNA, 20 bp, Artificial Sequence
  Chr1p_9 Forward Primer
gctgcttccattgtctccat

SEQ ID NO: 27638 - DNA, 20 bp, Artificial Sequence
  Chr1p_9 Forward Primer
agtgcaaacctaccgacaca

SEQ ID NO: 27639 - DNA, 20 bp, Artificial Sequence
  Chr1p_9 Forward Primer
tgcatcgttaagcatggaaa

SEQ ID NO: 27640 - DNA, 20 bp, Artificial Sequence
  Chr1p_9 Forward Primer
gaggtatgcccatgctgatt

SEQ ID NO: 27641 - DNA, 20 bp, Artificial Sequence
  Chr1p_9 Forward Primer
tctgttgtttgtcagcagcc

SEQ ID NO: 27642 - DNA, 20 bp, Artificial Sequence
  Chr1p_9 Forward Primer
ccaaatcagagccgaaaaga

SEQ ID NO: 27643 - DNA, 27 bp, Artificial Sequence
  Chr1p_9 Forward Primer
aaaagtttattcttgaacataagcagg

SEQ ID NO: 27644 - DNA, 21 bp, Artificial Sequence
  Chr1p_9 Forward Primer
ctcaagaaaaggtcattggga

SEQ ID NO: 27645 - DNA, 21 bp, Artificial Sequence
  Chr1p_9 Forward Primer
tgtaattccatgttgtgtggc

SEQ ID NO: 27646 - DNA, 20 bp, Artificial Sequence
  Chr1p_9 Forward Primer
tgcatgccttctcacatacc

SEQ ID NO: 27647 - DNA, 21 bp, Artificial Sequence
  Chr1p_9 Forward Primer
ccatgtgtcatgggttagagg

SEQ ID NO: 27648 - DNA, 26 bp, Artificial Sequence
  Chr1p_9 Forward Primer
gtacctgaaaggttattttgttcaag

SEQ ID NO: 27649 - DNA, 20 bp, Artificial Sequence
  Chr1p_9 Forward Primer
aaagcaatcccttccagaca

SEQ ID NO: 27650 - DNA, 20 bp, Artificial Sequence
  Chr1p_9 Forward Primer
gaaaccccagacctctgctt

SEQ ID NO: 27651 - DNA, 20 bp, Artificial Sequence
  Chr1p_9 Forward Primer
cacatctcttgtccagtggc

SEQ ID NO: 27652 - DNA, 20 bp, Artificial Sequence
  Chr1p_9 Forward Primer
tgcagctgtattttgttgga

SEQ ID NO: 27653 - DNA, 20 bp, Artificial Sequence
  Chr1p_9 Forward Primer
tggagacggaaataaaaggg

SEQ ID NO: 27654 - DNA, 20 bp, Artificial Sequence
  Chr1p_9 Forward Primer
caagccactaaagctggagg

SEQ ID NO: 27655 - DNA, 24 bp, Artificial Sequence
  Chr1p_9 Forward Primer
cattttaaacttcaagccaacctt

SEQ ID NO: 27656 - DNA, 20 bp, Artificial Sequence
  Chr1p_9 Forward Primer
ggcaaaggggttaaaggtct

SEQ ID NO: 27657 - DNA, 20 bp, Artificial Sequence
  Chr1p_9 Forward Primer
ggatgagcaaaaaggtcagg

SEQ ID NO: 27658 - DNA, 20 bp, Artificial Sequence
  Chr1p_9 Forward Primer
catttccaaacagaagggga

SEQ ID NO: 27659 - DNA, 27 bp, Artificial Sequence
  Chr1p_9 Forward Primer
tttaccttctagtttaatcaaggatca

SEQ ID NO: 27660 - DNA, 21 bp, Artificial Sequence
  Chr1p_9 Forward Primer
tgaaggaggtggggatttatt

SEQ ID NO: 27661 - DNA, 20 bp, Artificial Sequence
  Chr1p_9 Forward Primer
cagtttcaaaatcgccaaca

SEQ ID NO: 27662 - DNA, 23 bp, Artificial Sequence
  Chr1p_9 Forward Primer
tgctatgagaagacaaagaaggg

SEQ ID NO: 27663 - DNA, 20 bp, Artificial Sequence
  Chr1p_9 Forward Primer
acaggctgtgtggtaggagg

SEQ ID NO: 27664 - DNA, 20 bp, Artificial Sequence
  Chr1p_9 Forward Primer
aatccctagaagcagggacc

SEQ ID NO: 27665 - DNA, 20 bp, Artificial Sequence
  Chr1p_9 Forward Primer
gttagcttggttcggctgag

SEQ ID NO: 27666 - DNA, 20 bp, Artificial Sequence
  Chr1p_9 Forward Primer
gtcccaagcccgtaacataa

SEQ ID NO: 27667 - DNA, 20 bp, Artificial Sequence
  Chr1p_9 Forward Primer
agtttccctcctgtgggact

SEQ ID NO: 27668 - DNA, 20 bp, Artificial Sequence
  Chr1p_9 Forward Primer
ggctagcatgtggtaggacc

SEQ ID NO: 27669 - DNA, 20 bp, Artificial Sequence
  Chr1p_9 Forward Primer
atgcaagctgcttctgatcc

SEQ ID NO: 27670 - DNA, 21 bp, Artificial Sequence
  Chr1p_9 Forward Primer
tgcagatagaggaccttcacc

SEQ ID NO: 27671 - DNA, 20 bp, Artificial Sequence
  Chr1p_9 Forward Primer
tactctaacaagcggcccat

SEQ ID NO: 27672 - DNA, 20 bp, Artificial Sequence
  Chr1p_9 Forward Primer
tctcagcctttcgctcctta

SEQ ID NO: 27673 - DNA, 20 bp, Artificial Sequence
  Chr1p_9 Forward Primer
ctaccatcccccttgctaca

SEQ ID NO: 27674 - DNA, 20 bp, Artificial Sequence
  Chr1p_9 Forward Primer
cccaggcatactctttgagc

SEQ ID NO: 27675 - DNA, 20 bp, Artificial Sequence
  Chr1p_9 Forward Primer
gggggcttactagccatttc

SEQ ID NO: 27676 - DNA, 20 bp, Artificial Sequence
  Chr1p_9 Forward Primer
ttccctgctatatgatgcca

SEQ ID NO: 27677 - DNA, 20 bp, Artificial Sequence
  Chr1p_9 Forward Primer
agagggcaaaggaagaaagc

SEQ ID NO: 27678 - DNA, 20 bp, Artificial Sequence
  Chr1p_9 Forward Primer
gaatggcccaagtaaagcaa

SEQ ID NO: 27679 - DNA, 20 bp, Artificial Sequence
  Chr1p_9 Forward Primer
agcccatttgtcaaaaccag

SEQ ID NO: 27680 - DNA, 20 bp, Artificial Sequence
  Chr1p_9 Forward Primer
tctgtgcctcctcagtttcc

SEQ ID NO: 27681 - DNA, 20 bp, Artificial Sequence
  Chr1p_9 Forward Primer
cgtctctttcctagacccca

SEQ ID NO: 27682 - DNA, 22 bp, Artificial Sequence
  Chr1p_9 Forward Primer
gaagcttcggagacttcaaaaa

SEQ ID NO: 27683 - DNA, 20 bp, Artificial Sequence
  Chr1p_9 Forward Primer
aagcaaccatggagatttgg

SEQ ID NO: 27684 - DNA, 23 bp, Artificial Sequence
  Chr1p_9 Forward Primer
tttaaaatcagtggcttgaattg

SEQ ID NO: 27685 - DNA, 20 bp, Artificial Sequence
  Chr1p_9 Forward Primer
tgtgattgtgcctttctggt

SEQ ID NO: 27686 - DNA, 20 bp, Artificial Sequence
  Chr1p_9 Forward Primer
tgctagcagcaccagctaag

SEQ ID NO: 27687 - DNA, 20 bp, Artificial Sequence
  Chr1p_9 Forward Primer
tctgtgcagtggcattccta

SEQ ID NO: 27688 - DNA, 20 bp, Artificial Sequence
  Chr1p_9 Forward Primer
ccccaaagagggaaactagg

SEQ ID NO: 27689 - DNA, 20 bp, Artificial Sequence
  Chr1p_9 Forward Primer
gtgatgagtggacacggcta

SEQ ID NO: 27690 - DNA, 20 bp, Artificial Sequence
  Chr1p_9 Forward Primer
ggggagaggattatgtgggt

SEQ ID NO: 27691 - DNA, 20 bp, Artificial Sequence
  Chr1p_9 Forward Primer
gaaagcgggtacacaatgct

SEQ ID NO: 27692 - DNA, 21 bp, Artificial Sequence
  Chr1p_9 Forward Primer
cagctaatattggcaagacca

SEQ ID NO: 27693 - DNA, 20 bp, Artificial Sequence
  Chr1p_9 Forward Primer
tgccaaggttttctgtccat

SEQ ID NO: 27694 - DNA, 20 bp, Artificial Sequence
  Chr1p_9 Forward Primer
ctcttgggagggtgcttatg

SEQ ID NO: 27695 - DNA, 20 bp, Artificial Sequence
  Chr1p_9 Forward Primer
gtgaataagggcctggaaca

SEQ ID NO: 27696 - DNA, 21 bp, Artificial Sequence
  Chr1p_9 Forward Primer
tccaactttcttcttgggtga

SEQ ID NO: 27697 - DNA, 21 bp, Artificial Sequence
  Chr1p_9 Forward Primer
gcccatgcattattgatgtct

SEQ ID NO: 27698 - DNA, 20 bp, Artificial Sequence
  Chr1p_9 Forward Primer
accccggaggaacttttaga

SEQ ID NO: 27699 - DNA, 21 bp, Artificial Sequence
  Chr1p_9 Forward Primer
tgacttgccctagttcagtgg

SEQ ID NO: 27700 - DNA, 20 bp, Artificial Sequence
  Chr1p_9 Forward Primer
ttctggaaaggcttggatct

SEQ ID NO: 27701 - DNA, 20 bp, Artificial Sequence
  Chr1p_9 Forward Primer
gcttttctttcccccaacat

SEQ ID NO: 27702 - DNA, 20 bp, Artificial Sequence
  Chr1p_9 Forward Primer
acatacaacccctcttcccc

SEQ ID NO: 27703 - DNA, 20 bp, Artificial Sequence
  Chr1p_9 Forward Primer
gtgtggaagagcctgagagc

SEQ ID NO: 27704 - DNA, 22 bp, Artificial Sequence
  Chr1p_9 Forward Primer
tggaaaaagcaacagagtcaaa

SEQ ID NO: 27705 - DNA, 20 bp, Artificial Sequence
  Chr1p_9 Forward Primer
tgtcatccattcaactccca

SEQ ID NO: 27706 - DNA, 20 bp, Artificial Sequence
  Chr1p_9 Forward Primer
tagtgagaggaggcctggag

SEQ ID NO: 27707 - DNA, 20 bp, Artificial Sequence
  Chr1p_9 Forward Primer
tcaagacagtcatgggcaaa

SEQ ID NO: 27708 - DNA, 21 bp, Artificial Sequence
  Chr1p_9 Forward Primer
cacacccacacactttgagaa

SEQ ID NO: 27709 - DNA, 20 bp, Artificial Sequence
  Chr1p_9 Forward Primer
cagcaattccctcagatgct

SEQ ID NO: 27710 - DNA, 19 bp, Artificial Sequence
  Chr1p_9 Forward Primer
cccagtggatctccaggat

SEQ ID NO: 27711 - DNA, 20 bp, Artificial Sequence
  Chr1p_9 Forward Primer
gtcccttatttccattgcca

SEQ ID NO: 27712 - DNA, 20 bp, Artificial Sequence
  Chr1p_9 Forward Primer
agcttgtcgtgagctcctct

SEQ ID NO: 27713 - DNA, 25 bp, Artificial Sequence
  Chr1p_9 Reverse Primer
tccagtaatggtgtttatgattttg

SEQ ID NO: 27714 - DNA, 20 bp, Artificial Sequence
  Chr1p_9 Reverse Primer
ttcccataaacattcacgcc

SEQ ID NO: 27715 - DNA, 20 bp, Artificial Sequence
  Chr1p_9 Reverse Primer
gaaacagagtgggaaaggga

SEQ ID NO: 27716 - DNA, 20 bp, Artificial Sequence
  Chr1p_9 Reverse Primer
tatgaggtgcctgatgtgga

SEQ ID NO: 27717 - DNA, 24 bp, Artificial Sequence
  Chr1p_9 Reverse Primer
ttccaactaatctgaataaaggca

SEQ ID NO: 27718 - DNA, 21 bp, Artificial Sequence
  Chr1p_9 Reverse Primer
tcagagctgcctaacacatga

SEQ ID NO: 27719 - DNA, 20 bp, Artificial Sequence
  Chr1p_9 Reverse Primer
agcagctgaatgcccttaaa

SEQ ID NO: 27720 - DNA, 20 bp, Artificial Sequence
  Chr1p_9 Reverse Primer
gaggggagctacgagcttta

SEQ ID NO: 27721 - DNA, 20 bp, Artificial Sequence
  Chr1p_9 Reverse Primer
gggggaagacacgaaacatt

SEQ ID NO: 27722 - DNA, 21 bp, Artificial Sequence
  Chr1p_9 Reverse Primer
gcagactgtttctcttgtggg

SEQ ID NO: 27723 - DNA, 20 bp, Artificial Sequence
  Chr1p_9 Reverse Primer
gcagaatttggccataaaca

SEQ ID NO: 27724 - DNA, 20 bp, Artificial Sequence
  Chr1p_9 Reverse Primer
aatacccacctcatccacca

SEQ ID NO: 27725 - DNA, 20 bp, Artificial Sequence
  Chr1p_9 Reverse Primer
cgccgaactaaacattccac

SEQ ID NO: 27726 - DNA, 20 bp, Artificial Sequence
  Chr1p_9 Reverse Primer
agggcacaaatgacaagtcc

SEQ ID NO: 27727 - DNA, 20 bp, Artificial Sequence
  Chr1p_9 Reverse Primer
gtgggaaaaccacgtgaaac

SEQ ID NO: 27728 - DNA, 20 bp, Artificial Sequence
  Chr1p_9 Reverse Primer
acacacacagtgaggcagga

SEQ ID NO: 27729 - DNA, 23 bp, Artificial Sequence
  Chr1p_9 Reverse Primer
tcactgtgcaatttcaaggtttt

SEQ ID NO: 27730 - DNA, 20 bp, Artificial Sequence
  Chr1p_9 Reverse Primer
ttaggatgacagcgatgagc

SEQ ID NO: 27731 - DNA, 21 bp, Artificial Sequence
  Chr1p_9 Reverse Primer
gatggggtttgttgtttgttg

SEQ ID NO: 27732 - DNA, 20 bp, Artificial Sequence
  Chr1p_9 Reverse Primer
tgtaactttccccttggtgg

SEQ ID NO: 27733 - DNA, 20 bp, Artificial Sequence
  Chr1p_9 Reverse Primer
ttttcaaggtctgattgcca

SEQ ID NO: 27734 - DNA, 21 bp, Artificial Sequence
  Chr1p_9 Reverse Primer
cagaacagtgtctaaaggccc

SEQ ID NO: 27735 - DNA, 20 bp, Artificial Sequence
  Chr1p_9 Reverse Primer
gcagtggattacggcttctc

SEQ ID NO: 27736 - DNA, 20 bp, Artificial Sequence
  Chr1p_9 Reverse Primer
ctagcatcacgcctgttcaa

SEQ ID NO: 27737 - DNA, 20 bp, Artificial Sequence
  Chr1p_9 Reverse Primer
tgtcctttggaaacattggg

SEQ ID NO: 27738 - DNA, 23 bp, Artificial Sequence
  Chr1p_9 Reverse Primer
agaaaggtgttggagtgactcat

SEQ ID NO: 27739 - DNA, 20 bp, Artificial Sequence
  Chr1p_9 Reverse Primer
agtggagctgctgaatctga

SEQ ID NO: 27740 - DNA, 21 bp, Artificial Sequence
  Chr1p_9 Reverse Primer
tgctttcctcagaaacacaca

SEQ ID NO: 27741 - DNA, 20 bp, Artificial Sequence
  Chr1p_9 Reverse Primer
ttgcagcatatcccaaaatg

SEQ ID NO: 27742 - DNA, 20 bp, Artificial Sequence
  Chr1p_9 Reverse Primer
atgtgggagagagtgggttg

SEQ ID NO: 27743 - DNA, 20 bp, Artificial Sequence
  Chr1p_9 Reverse Primer
tccaatttattgccaaacca

SEQ ID NO: 27744 - DNA, 25 bp, Artificial Sequence
  Chr1p_9 Reverse Primer
actcatctcaaagagtgaaccttct

SEQ ID NO: 27745 - DNA, 22 bp, Artificial Sequence
  Chr1p_9 Reverse Primer
gcaaaccttagaagtgtgcttg

SEQ ID NO: 27746 - DNA, 20 bp, Artificial Sequence
  Chr1p_9 Reverse Primer
aaacgttgacagcaaaaggg

SEQ ID NO: 27747 - DNA, 21 bp, Artificial Sequence
  Chr1p_9 Reverse Primer
tgtcttttcaaagggctatgg

SEQ ID NO: 27748 - DNA, 20 bp, Artificial Sequence
  Chr1p_9 Reverse Primer
tgacaggccatttcaacact

SEQ ID NO: 27749 - DNA, 20 bp, Artificial Sequence
  Chr1p_9 Reverse Primer
atttttcagccagcgcttag

SEQ ID NO: 27750 - DNA, 21 bp, Artificial Sequence
  Chr1p_9 Reverse Primer
caccaacaaaagcttgtagca

SEQ ID NO: 27751 - DNA, 20 bp, Artificial Sequence
  Chr1p_9 Reverse Primer
tccccacccttcctgtttag

SEQ ID NO: 27752 - DNA, 20 bp, Artificial Sequence
  Chr1p_9 Reverse Primer
ccaggaaccactgttggact

SEQ ID NO: 27753 - DNA, 20 bp, Artificial Sequence
  Chr1p_9 Reverse Primer
caaaaccctctaccctggct

SEQ ID NO: 27754 - DNA, 20 bp, Artificial Sequence
  Chr1p_9 Reverse Primer
aggccctgcattatagcaaa

SEQ ID NO: 27755 - DNA, 20 bp, Artificial Sequence
  Chr1p_9 Reverse Primer
tggtcagtttttctgcctca

SEQ ID NO: 27756 - DNA, 20 bp, Artificial Sequence
  Chr1p_9 Reverse Primer
cgtcagtccatcactgcttg

SEQ ID NO: 27757 - DNA, 23 bp, Artificial Sequence
  Chr1p_9 Reverse Primer
tttcacttccacacaactttgaa

SEQ ID NO: 27758 - DNA, 22 bp, Artificial Sequence
  Chr1p_9 Reverse Primer
ccctgaataagacatgctttgg

SEQ ID NO: 27759 - DNA, 20 bp, Artificial Sequence
  Chr1p_9 Reverse Primer
tgtcattctccaagccttcc

SEQ ID NO: 27760 - DNA, 20 bp, Artificial Sequence
  Chr1p_9 Reverse Primer
ctccctggggataagaggag

SEQ ID NO: 27761 - DNA, 21 bp, Artificial Sequence
  Chr1p_9 Reverse Primer
gagcccaggacatgtgactaa

SEQ ID NO: 27762 - DNA, 20 bp, Artificial Sequence
  Chr1p_9 Reverse Primer
catcttggtattcccatgcc

SEQ ID NO: 27763 - DNA, 20 bp, Artificial Sequence
  Chr1p_9 Reverse Primer
tggcatcctatggggataag

SEQ ID NO: 27764 - DNA, 20 bp, Artificial Sequence
  Chr1p_9 Reverse Primer
catgatcttgtcccagggtt

SEQ ID NO: 27765 - DNA, 24 bp, Artificial Sequence
  Chr1p_9 Reverse Primer
gctgagcaatctagaccatacaca

SEQ ID NO: 27766 - DNA, 21 bp, Artificial Sequence
  Chr1p_9 Reverse Primer
ggttgatgaattctcccattg

SEQ ID NO: 27767 - DNA, 19 bp, Artificial Sequence
  Chr1p_9 Reverse Primer
ggagatgctgggtctccat

SEQ ID NO: 27768 - DNA, 20 bp, Artificial Sequence
  Chr1p_9 Reverse Primer
gggaagcgcttaattgtcag

SEQ ID NO: 27769 - DNA, 20 bp, Artificial Sequence
  Chr1p_9 Reverse Primer
gagcatgcaaaaatgggttt

SEQ ID NO: 27770 - DNA, 20 bp, Artificial Sequence
  Chr1p_9 Reverse Primer
ccaaggtttcaaatgaggca

SEQ ID NO: 27771 - DNA, 20 bp, Artificial Sequence
  Chr1p_9 Reverse Primer
gatcaggctcatggctcatt

SEQ ID NO: 27772 - DNA, 20 bp, Artificial Sequence
  Chr1p_9 Reverse Primer
ccgaaagcactccctcaata

SEQ ID NO: 27773 - DNA, 20 bp, Artificial Sequence
  Chr1p_9 Reverse Primer
gcagccaacagccaatactt

SEQ ID NO: 27774 - DNA, 23 bp, Artificial Sequence
  Chr1p_9 Reverse Primer
tgaacaggaattattttgcatcc

SEQ ID NO: 27775 - DNA, 20 bp, Artificial Sequence
  Chr1p_9 Reverse Primer
cagtaagggagagcatggga

SEQ ID NO: 27776 - DNA, 22 bp, Artificial Sequence
  Chr1p_9 Reverse Primer
ggtacgctgaaaaagctacatt

SEQ ID NO: 27777 - DNA, 20 bp, Artificial Sequence
  Chr1p_9 Reverse Primer
ttcgcaaaatttaggcatca

SEQ ID NO: 27778 - DNA, 24 bp, Artificial Sequence
  Chr1p_9 Reverse Primer
ttcatctgtctccaacatacaaaa

SEQ ID NO: 27779 - DNA, 21 bp, Artificial Sequence
  Chr1p_9 Reverse Primer
tggagcagaatgacaacttga

SEQ ID NO: 27780 - DNA, 20 bp, Artificial Sequence
  Chr1p_9 Reverse Primer
caaaagctgtttgctgtcca

SEQ ID NO: 27781 - DNA, 20 bp, Artificial Sequence
  Chr1p_9 Reverse Primer
ccaccatttcatttttgcct

SEQ ID NO: 27782 - DNA, 20 bp, Artificial Sequence
  Chr1p_9 Reverse Primer
tcccatgtttactgggaagg

SEQ ID NO: 27783 - DNA, 20 bp, Artificial Sequence
  Chr1p_9 Reverse Primer
ttggcacctcagtttttgtg

SEQ ID NO: 27784 - DNA, 27 bp, Artificial Sequence
  Chr1p_9 Reverse Primer
tacttaatcctgtgtgttacctctcaa

SEQ ID NO: 27785 - DNA, 20 bp, Artificial Sequence
  Chr1p_9 Reverse Primer
tgtttggaaggtgccttttc

SEQ ID NO: 27786 - DNA, 23 bp, Artificial Sequence
  Chr1p_9 Reverse Primer
ttcatatgcactttctgcttttg

SEQ ID NO: 27787 - DNA, 20 bp, Artificial Sequence
  Chr1p_9 Reverse Primer
tgtgactctgggagtgagga

SEQ ID NO: 27788 - DNA, 23 bp, Artificial Sequence
  Chr1p_9 Reverse Primer
tgtacagggtgaacaaatctcaa

SEQ ID NO: 27789 - DNA, 20 bp, Artificial Sequence
  Chr1p_9 Reverse Primer
gtgccactgatgtgaagagg

SEQ ID NO: 27790 - DNA, 20 bp, Artificial Sequence
  Chr1p_9 Reverse Primer
gggaaagtgaagttcaggca

SEQ ID NO: 27791 - DNA, 20 bp, Artificial Sequence
  Chr1p_9 Reverse Primer
cacactccttttgcttgagg

SEQ ID NO: 27792 - DNA, 20 bp, Artificial Sequence
  Chr1p_9 Reverse Primer
agcctcggttttctcatctg

SEQ ID NO: 27793 - DNA, 20 bp, Artificial Sequence
  Chr1p_9 Reverse Primer
gctctggaagagtcaccagc

SEQ ID NO: 27794 - DNA, 20 bp, Artificial Sequence
  Chr1p_9 Reverse Primer
tctctgcgtttgccctaagt

SEQ ID NO: 27795 - DNA, 20 bp, Artificial Sequence
  Chr1p_9 Reverse Primer
aggcaaggtagccaaactga

SEQ ID NO: 27796 - DNA, 20 bp, Artificial Sequence
  Chr1p_9 Reverse Primer
caaggaaaacgcagttgcta

SEQ ID NO: 27797 - DNA, 20 bp, Artificial Sequence
  Chr1p_9 Reverse Primer
ccaggagcctctgactgaag

SEQ ID NO: 27798 - DNA, 20 bp, Artificial Sequence
  Chr1p_9 Reverse Primer
tgagggaaaatctgtggagg

SEQ ID NO: 27799 - DNA, 20 bp, Artificial Sequence
  Chr1p_9 Reverse Primer
ggccactggtcacttcattt

SEQ ID NO: 27800 - DNA, 20 bp, Artificial Sequence
  Chr1p_9 Reverse Primer
cgggtttgggttatgagaga

SEQ ID NO: 27801 - DNA, 20 bp, Artificial Sequence
  Chr1p_9 Reverse Primer
acgaacaggactcgccttta

SEQ ID NO: 27802 - DNA, 20 bp, Artificial Sequence
  Chr1p_9 Reverse Primer
cttgcagttggcacttgtgt

SEQ ID NO: 27803 - DNA, 21 bp, Artificial Sequence
  Chr1p_9 Reverse Primer
tctttcccctctctgagaacc

SEQ ID NO: 27804 - DNA, 20 bp, Artificial Sequence
  Chr1p_9 Reverse Primer
gccctcatctgtgaccctaa

SEQ ID NO: 27805 - DNA, 20 bp, Artificial Sequence
  Chr1p_9 Reverse Primer
agtttgtcattggccacaca

SEQ ID NO: 27806 - DNA, 20 bp, Artificial Sequence
  Chr1p_9 Reverse Primer
gaaattccaagtcctgcctg

SEQ ID NO: 27807 - DNA, 21 bp, Artificial Sequence
  Chr1p_9 Reverse Primer
gggataaggaaagcttcttgc

SEQ ID NO: 27808 - DNA, 21 bp, Artificial Sequence
  Chr1p_9 Reverse Primer
tgggtgtagtttgttgctgtg

SEQ ID NO: 27809 - DNA, 20 bp, Artificial Sequence
  Chr1p_10 Forward Primer
ttctgtccccagttttcacc

SEQ ID NO: 27810 - DNA, 19 bp, Artificial Sequence
  Chr1p_10 Forward Primer
cttgaagaggcttcccctg

SEQ ID NO: 27811 - DNA, 20 bp, Artificial Sequence
  Chr1p_10 Forward Primer
gccttatggggtttacagca

SEQ ID NO: 27812 - DNA, 20 bp, Artificial Sequence
  Chr1p_10 Forward Primer
tgtggaaggaaggaaggatg

SEQ ID NO: 27813 - DNA, 26 bp, Artificial Sequence
  Chr1p_10 Forward Primer
ataatacatgtaaagttgatccaagc

SEQ ID NO: 27814 - DNA, 20 bp, Artificial Sequence
  Chr1p_10 Forward Primer
cacactgcctcctcagcata

SEQ ID NO: 27815 - DNA, 21 bp, Artificial Sequence
  Chr1p_10 Forward Primer
cagaaacatttctcgggactg

SEQ ID NO: 27816 - DNA, 20 bp, Artificial Sequence
  Chr1p_10 Forward Primer
ccaagatccaggcaatttgt

SEQ ID NO: 27817 - DNA, 19 bp, Artificial Sequence
  Chr1p_10 Forward Primer
gaggcacaagcccaagaat

SEQ ID NO: 27818 - DNA, 21 bp, Artificial Sequence
  Chr1p_10 Forward Primer
tcaagctgtcagaaaggttcc

SEQ ID NO: 27819 - DNA, 20 bp, Artificial Sequence
  Chr1p_10 Forward Primer
attttgcttggtaagctggc

SEQ ID NO: 27820 - DNA, 20 bp, Artificial Sequence
  Chr1p_10 Forward Primer
catggacagttgcacagtga

SEQ ID NO: 27821 - DNA, 25 bp, Artificial Sequence
  Chr1p_10 Forward Primer
tgtttgttggttagatgaaatgaaa

SEQ ID NO: 27822 - DNA, 20 bp, Artificial Sequence
  Chr1p_10 Forward Primer
cccctcaccatcactctcat

SEQ ID NO: 27823 - DNA, 20 bp, Artificial Sequence
  Chr1p_10 Forward Primer
ggccacatgtagggcttaac

SEQ ID NO: 27824 - DNA, 20 bp, Artificial Sequence
  Chr1p_10 Forward Primer
ggcaaaccttgtctcaaagc

SEQ ID NO: 27825 - DNA, 20 bp, Artificial Sequence
  Chr1p_10 Forward Primer
acaggactgctccacaaacc

SEQ ID NO: 27826 - DNA, 20 bp, Artificial Sequence
  Chr1p_10 Forward Primer
tgcaaagatccagtcatcca

SEQ ID NO: 27827 - DNA, 21 bp, Artificial Sequence
  Chr1p_10 Forward Primer
ggaggagggaactacttgcag

SEQ ID NO: 27828 - DNA, 20 bp, Artificial Sequence
  Chr1p_10 Forward Primer
tcatccggctttaaagtgct

SEQ ID NO: 27829 - DNA, 20 bp, Artificial Sequence
  Chr1p_10 Forward Primer
ccttcagtgagagatgggga

SEQ ID NO: 27830 - DNA, 20 bp, Artificial Sequence
  Chr1p_10 Forward Primer
gcgtgatccagagcattgta

SEQ ID NO: 27831 - DNA, 22 bp, Artificial Sequence
  Chr1p_10 Forward Primer
tgtcatccttctccttcagttg

SEQ ID NO: 27832 - DNA, 20 bp, Artificial Sequence
  Chr1p_10 Forward Primer
agggaaggctgtagagaggg

SEQ ID NO: 27833 - DNA, 20 bp, Artificial Sequence
  Chr1p_10 Forward Primer
aggcttcaggcagaatttca

SEQ ID NO: 27834 - DNA, 25 bp, Artificial Sequence
  Chr1p_10 Forward Primer
tttttgtatccattaaccaatcttt

SEQ ID NO: 27835 - DNA, 20 bp, Artificial Sequence
  Chr1p_10 Forward Primer
caggatgaatctggaaggga

SEQ ID NO: 27836 - DNA, 20 bp, Artificial Sequence
  Chr1p_10 Forward Primer
tgagttgcaggcaatgaaag

SEQ ID NO: 27837 - DNA, 20 bp, Artificial Sequence
  Chr1p_10 Forward Primer
tgtttctttggaaaccccat

SEQ ID NO: 27838 - DNA, 20 bp, Artificial Sequence
  Chr1p_10 Forward Primer
tggaggatggaaaaatggag

SEQ ID NO: 27839 - DNA, 20 bp, Artificial Sequence
  Chr1p_10 Forward Primer
atcccccaaactaccaccat

SEQ ID NO: 27840 - DNA, 20 bp, Artificial Sequence
  Chr1p_10 Forward Primer
tagaaacacccctcaccagg

SEQ ID NO: 27841 - DNA, 20 bp, Artificial Sequence
  Chr1p_10 Forward Primer
agccctcttgaccaattcct

SEQ ID NO: 27842 - DNA, 20 bp, Artificial Sequence
  Chr1p_10 Forward Primer
acccaaactgaggaacatgc

SEQ ID NO: 27843 - DNA, 20 bp, Artificial Sequence
  Chr1p_10 Forward Primer
atccactggtgatgggacat

SEQ ID NO: 27844 - DNA, 23 bp, Artificial Sequence
  Chr1p_10 Forward Primer
cagacaggaggaaataatggagg

SEQ ID NO: 27845 - DNA, 23 bp, Artificial Sequence
  Chr1p_10 Forward Primer
ttcccagtgtctttaaaaatgaa

SEQ ID NO: 27846 - DNA, 20 bp, Artificial Sequence
  Chr1p_10 Forward Primer
tgagtgggggtgtgtgtaaa

SEQ ID NO: 27847 - DNA, 20 bp, Artificial Sequence
  Chr1p_10 Forward Primer
acacatgtgggaagggagag

SEQ ID NO: 27848 - DNA, 20 bp, Artificial Sequence
  Chr1p_10 Forward Primer
ttggcccttaacaacagtcc

SEQ ID NO: 27849 - DNA, 20 bp, Artificial Sequence
  Chr1p_10 Forward Primer
ggcccattcattcactcatt

SEQ ID NO: 27850 - DNA, 20 bp, Artificial Sequence
  Chr1p_10 Forward Primer
ttccttgttgctgtccattg

SEQ ID NO: 27851 - DNA, 20 bp, Artificial Sequence
  Chr1p_10 Forward Primer
acatcgtacaagtccccagg

SEQ ID NO: 27852 - DNA, 20 bp, Artificial Sequence
  Chr1p_10 Forward Primer
gcagttatgcttgcctctcc

SEQ ID NO: 27853 - DNA, 23 bp, Artificial Sequence
  Chr1p_10 Forward Primer
ttctgtaaagtgcttgctttctg

SEQ ID NO: 27854 - DNA, 20 bp, Artificial Sequence
  Chr1p_10 Forward Primer
ggagaggcgtttctgttcac

SEQ ID NO: 27855 - DNA, 24 bp, Artificial Sequence
  Chr1p_10 Forward Primer
ggctgtattaagaaagcacagaaa

SEQ ID NO: 27856 - DNA, 20 bp, Artificial Sequence
  Chr1p_10 Forward Primer
cccaaagacaagtcctccaa

SEQ ID NO: 27857 - DNA, 20 bp, Artificial Sequence
  Chr1p_10 Forward Primer
tagacccaggttcagcgagt

SEQ ID NO: 27858 - DNA, 20 bp, Artificial Sequence
  Chr1p_10 Forward Primer
acgggatattgttcaccagc

SEQ ID NO: 27859 - DNA, 20 bp, Artificial Sequence
  Chr1p_10 Forward Primer
gaccagtgagccaagtagcc

SEQ ID NO: 27860 - DNA, 20 bp, Artificial Sequence
  Chr1p_10 Forward Primer
ggttgggaggagacttggat

SEQ ID NO: 27861 - DNA, 20 bp, Artificial Sequence
  Chr1p_10 Forward Primer
tctctgggagaacatgcctt

SEQ ID NO: 27862 - DNA, 20 bp, Artificial Sequence
  Chr1p_10 Forward Primer
gggtcctgcttctcttctcc

SEQ ID NO: 27863 - DNA, 20 bp, Artificial Sequence
  Chr1p_10 Forward Primer
gctaatgtttttcggggaca

SEQ ID NO: 27864 - DNA, 20 bp, Artificial Sequence
  Chr1p_10 Forward Primer
ttgcccaggattccttagtg

SEQ ID NO: 27865 - DNA, 20 bp, Artificial Sequence
  Chr1p_10 Forward Primer
ctcctcagtggtccctcttg

SEQ ID NO: 27866 - DNA, 25 bp, Artificial Sequence
  Chr1p_10 Forward Primer
ttaatggataatacttcctggttgc

SEQ ID NO: 27867 - DNA, 20 bp, Artificial Sequence
  Chr1p_10 Forward Primer
gccttgggttagggctgtat

SEQ ID NO: 27868 - DNA, 20 bp, Artificial Sequence
  Chr1p_10 Forward Primer
aggtggctttttagggctgt

SEQ ID NO: 27869 - DNA, 20 bp, Artificial Sequence
  Chr1p_10 Forward Primer
gggtgctaatcctgtgccta

SEQ ID NO: 27870 - DNA, 20 bp, Artificial Sequence
  Chr1p_10 Forward Primer
acagtggcttcccaccatac

SEQ ID NO: 27871 - DNA, 20 bp, Artificial Sequence
  Chr1p_10 Forward Primer
atcaccttgcccttgttgtc

SEQ ID NO: 27872 - DNA, 20 bp, Artificial Sequence
  Chr1p_10 Forward Primer
atcacgtgggatgctcattt

SEQ ID NO: 27873 - DNA, 20 bp, Artificial Sequence
  Chr1p_10 Forward Primer
ctggttaggcagaacttggc

SEQ ID NO: 27874 - DNA, 20 bp, Artificial Sequence
  Chr1p_10 Forward Primer
gcagggctttgcgttactac

SEQ ID NO: 27875 - DNA, 20 bp, Artificial Sequence
  Chr1p_10 Forward Primer
gcctctctggaacttcctcc

SEQ ID NO: 27876 - DNA, 23 bp, Artificial Sequence
  Chr1p_10 Forward Primer
ctaccaaatcataatgttgccat

SEQ ID NO: 27877 - DNA, 20 bp, Artificial Sequence
  Chr1p_10 Forward Primer
ctcccttctgcctcctttct

SEQ ID NO: 27878 - DNA, 20 bp, Artificial Sequence
  Chr1p_10 Forward Primer
atcaggattcttgggaggct

SEQ ID NO: 27879 - DNA, 20 bp, Artificial Sequence
  Chr1p_10 Forward Primer
ctgggttcaagctgtgagtg

SEQ ID NO: 27880 - DNA, 20 bp, Artificial Sequence
  Chr1p_10 Forward Primer
aaagcctccagctctccttc

SEQ ID NO: 27881 - DNA, 20 bp, Artificial Sequence
  Chr1p_10 Forward Primer
gctcttggttgaaccggtaa

SEQ ID NO: 27882 - DNA, 20 bp, Artificial Sequence
  Chr1p_10 Forward Primer
aaacaatgggtgaggcaaag

SEQ ID NO: 27883 - DNA, 20 bp, Artificial Sequence
  Chr1p_10 Forward Primer
cctacttttcatggggcaga

SEQ ID NO: 27884 - DNA, 21 bp, Artificial Sequence
  Chr1p_10 Forward Primer
ccttagcagagaccacaatgg

SEQ ID NO: 27885 - DNA, 20 bp, Artificial Sequence
  Chr1p_10 Forward Primer
ctggagactctggcgtgttt

SEQ ID NO: 27886 - DNA, 20 bp, Artificial Sequence
  Chr1p_10 Forward Primer
taaaatgtgcctctgcctcc

SEQ ID NO: 27887 - DNA, 20 bp, Artificial Sequence
  Chr1p_10 Forward Primer
gattctggtgctccaccact

SEQ ID NO: 27888 - DNA, 20 bp, Artificial Sequence
  Chr1p_10 Forward Primer
attctgcaaaaaggggacct

SEQ ID NO: 27889 - DNA, 20 bp, Artificial Sequence
  Chr1p_10 Forward Primer
aagtgtgatgccagggaaag

SEQ ID NO: 27890 - DNA, 20 bp, Artificial Sequence
  Chr1p_10 Forward Primer
cgtagctgagaggacttgcc

SEQ ID NO: 27891 - DNA, 20 bp, Artificial Sequence
  Chr1p_10 Forward Primer
gggagttggggcagataaat

SEQ ID NO: 27892 - DNA, 20 bp, Artificial Sequence
  Chr1p_10 Forward Primer
gaggaaggggaagaaggaaa

SEQ ID NO: 27893 - DNA, 20 bp, Artificial Sequence
  Chr1p_10 Forward Primer
gcttggtgttgattccctgt

SEQ ID NO: 27894 - DNA, 20 bp, Artificial Sequence
  Chr1p_10 Forward Primer
atgaggatctgggacattgc

SEQ ID NO: 27895 - DNA, 20 bp, Artificial Sequence
  Chr1p_10 Forward Primer
ttcctccctaagcacaccac

SEQ ID NO: 27896 - DNA, 20 bp, Artificial Sequence
  Chr1p_10 Forward Primer
gggaaactgttgccttcatc

SEQ ID NO: 27897 - DNA, 20 bp, Artificial Sequence
  Chr1p_10 Forward Primer
ctcagaggaaaaggtggacg

SEQ ID NO: 27898 - DNA, 23 bp, Artificial Sequence
  Chr1p_10 Forward Primer
tttatggtgcatttagtggtttg

SEQ ID NO: 27899 - DNA, 20 bp, Artificial Sequence
  Chr1p_10 Forward Primer
ctcttccagccggagatttt

SEQ ID NO: 27900 - DNA, 22 bp, Artificial Sequence
  Chr1p_10 Forward Primer
tgctcttgtttcagtttcatca

SEQ ID NO: 27901 - DNA, 20 bp, Artificial Sequence
  Chr1p_10 Forward Primer
tctttctcccgtgtggattt

SEQ ID NO: 27902 - DNA, 20 bp, Artificial Sequence
  Chr1p_10 Forward Primer
ataaagtggctaccccctgc

SEQ ID NO: 27903 - DNA, 20 bp, Artificial Sequence
  Chr1p_10 Forward Primer
cccaaagtccaattgagtcc

SEQ ID NO: 27904 - DNA, 20 bp, Artificial Sequence
  Chr1p_10 Forward Primer
gcagcctcatgaacatctga

SEQ ID NO: 27905 - DNA, 20 bp, Artificial Sequence
  Chr1p_10 Reverse Primer
aggcacagggttgtgatagg

SEQ ID NO: 27906 - DNA, 21 bp, Artificial Sequence
  Chr1p_10 Reverse Primer
cttcagcacttactggtgtgc

SEQ ID NO: 27907 - DNA, 20 bp, Artificial Sequence
  Chr1p_10 Reverse Primer
ttaaatcctcctgcctgtgc

SEQ ID NO: 27908 - DNA, 20 bp, Artificial Sequence
  Chr1p_10 Reverse Primer
aagggattcttggtctggct

SEQ ID NO: 27909 - DNA, 21 bp, Artificial Sequence
  Chr1p_10 Reverse Primer
cctcaggttctcacctcacag

SEQ ID NO: 27910 - DNA, 20 bp, Artificial Sequence
  Chr1p_10 Reverse Primer
ggactttatttcaccgtggc

SEQ ID NO: 27911 - DNA, 24 bp, Artificial Sequence
  Chr1p_10 Reverse Primer
gaagatgaaaatgttcaattcagg

SEQ ID NO: 27912 - DNA, 20 bp, Artificial Sequence
  Chr1p_10 Reverse Primer
ggcatgggcattgtagaact

SEQ ID NO: 27913 - DNA, 20 bp, Artificial Sequence
  Chr1p_10 Reverse Primer
cacacgggagcaggtctatt

SEQ ID NO: 27914 - DNA, 20 bp, Artificial Sequence
  Chr1p_10 Reverse Primer
gatcatccagctcttgaccc

SEQ ID NO: 27915 - DNA, 20 bp, Artificial Sequence
  Chr1p_10 Reverse Primer
cacagaaggactatggggct

SEQ ID NO: 27916 - DNA, 20 bp, Artificial Sequence
  Chr1p_10 Reverse Primer
acagagaagggtggcttcct

SEQ ID NO: 27917 - DNA, 20 bp, Artificial Sequence
  Chr1p_10 Reverse Primer
tttcctagggatccccaatc

SEQ ID NO: 27918 - DNA, 20 bp, Artificial Sequence
  Chr1p_10 Reverse Primer
agaatgtgcattccctctgg

SEQ ID NO: 27919 - DNA, 23 bp, Artificial Sequence
  Chr1p_10 Reverse Primer
aacaaagcagacatagtccttgc

SEQ ID NO: 27920 - DNA, 20 bp, Artificial Sequence
  Chr1p_10 Reverse Primer
cccaaagttgaaagctggtg

SEQ ID NO: 27921 - DNA, 20 bp, Artificial Sequence
  Chr1p_10 Reverse Primer
caggctgacccttctttttg

SEQ ID NO: 27922 - DNA, 20 bp, Artificial Sequence
  Chr1p_10 Reverse Primer
atccgggtgaccagtatgaa

SEQ ID NO: 27923 - DNA, 20 bp, Artificial Sequence
  Chr1p_10 Reverse Primer
gctgccttctgctcaggata

SEQ ID NO: 27924 - DNA, 20 bp, Artificial Sequence
  Chr1p_10 Reverse Primer
gatgagttatcctcccacgg

SEQ ID NO: 27925 - DNA, 20 bp, Artificial Sequence
  Chr1p_10 Reverse Primer
cagccaggtgctgacagtaa

SEQ ID NO: 27926 - DNA, 20 bp, Artificial Sequence
  Chr1p_10 Reverse Primer
caggggcctatttctgtgac

SEQ ID NO: 27927 - DNA, 20 bp, Artificial Sequence
  Chr1p_10 Reverse Primer
ccctcctctgttccacattg

SEQ ID NO: 27928 - DNA, 20 bp, Artificial Sequence
  Chr1p_10 Reverse Primer
aacctgcctgcctgttagaa

SEQ ID NO: 27929 - DNA, 20 bp, Artificial Sequence
  Chr1p_10 Reverse Primer
ttacccctttcaggaagcat

SEQ ID NO: 27930 - DNA, 20 bp, Artificial Sequence
  Chr1p_10 Reverse Primer
caaagcaaggtaagaagccc

SEQ ID NO: 27931 - DNA, 20 bp, Artificial Sequence
  Chr1p_10 Reverse Primer
caaataccaacacgcatcca

SEQ ID NO: 27932 - DNA, 20 bp, Artificial Sequence
  Chr1p_10 Reverse Primer
ggcaaatgctctctgtctcc

SEQ ID NO: 27933 - DNA, 25 bp, Artificial Sequence
  Chr1p_10 Reverse Primer
cagcttatagttggagttgtcttga

SEQ ID NO: 27934 - DNA, 20 bp, Artificial Sequence
  Chr1p_10 Reverse Primer
gcaggaactccaatccactc

SEQ ID NO: 27935 - DNA, 20 bp, Artificial Sequence
  Chr1p_10 Reverse Primer
ggttgacattttggtgaggc

SEQ ID NO: 27936 - DNA, 20 bp, Artificial Sequence
  Chr1p_10 Reverse Primer
agtcaagcaagaggaatggc

SEQ ID NO: 27937 - DNA, 20 bp, Artificial Sequence
  Chr1p_10 Reverse Primer
tttcatggagagtgcgagtg

SEQ ID NO: 27938 - DNA, 20 bp, Artificial Sequence
  Chr1p_10 Reverse Primer
tggaccccattcaaccttta

SEQ ID NO: 27939 - DNA, 22 bp, Artificial Sequence
  Chr1p_10 Reverse Primer
ggagttatttcacctttgctgg

SEQ ID NO: 27940 - DNA, 21 bp, Artificial Sequence
  Chr1p_10 Reverse Primer
aataattcccctctgtgtggc

SEQ ID NO: 27941 - DNA, 20 bp, Artificial Sequence
  Chr1p_10 Reverse Primer
tgctaactaggcagccattg

SEQ ID NO: 27942 - DNA, 20 bp, Artificial Sequence
  Chr1p_10 Reverse Primer
tgatgccaattcatggctta

SEQ ID NO: 27943 - DNA, 20 bp, Artificial Sequence
  Chr1p_10 Reverse Primer
gttgctgggtggatgagaat

SEQ ID NO: 27944 - DNA, 20 bp, Artificial Sequence
  Chr1p_10 Reverse Primer
ataaaggtcacccctctggg

SEQ ID NO: 27945 - DNA, 21 bp, Artificial Sequence
  Chr1p_10 Reverse Primer
gcagttgggaattttctctcc

SEQ ID NO: 27946 - DNA, 20 bp, Artificial Sequence
  Chr1p_10 Reverse Primer
accacgagactgggaagaga

SEQ ID NO: 27947 - DNA, 20 bp, Artificial Sequence
  Chr1p_10 Reverse Primer
tccagccaaaacaaaacaaa

SEQ ID NO: 27948 - DNA, 20 bp, Artificial Sequence
  Chr1p_10 Reverse Primer
ctgaggctgaaacaggcaat

SEQ ID NO: 27949 - DNA, 20 bp, Artificial Sequence
  Chr1p_10 Reverse Primer
agactccagactgctgtcca

SEQ ID NO: 27950 - DNA, 20 bp, Artificial Sequence
  Chr1p_10 Reverse Primer
ttggagggtgcttcagaact

SEQ ID NO: 27951 - DNA, 20 bp, Artificial Sequence
  Chr1p_10 Reverse Primer
tgtttctccaggactctggc

SEQ ID NO: 27952 - DNA, 20 bp, Artificial Sequence
  Chr1p_10 Reverse Primer
atggacatttatgcccctca

SEQ ID NO: 27953 - DNA, 20 bp, Artificial Sequence
  Chr1p_10 Reverse Primer
cctgagaggagccattgaag

SEQ ID NO: 27954 - DNA, 20 bp, Artificial Sequence
  Chr1p_10 Reverse Primer
agacttgtcctcgttggcag

SEQ ID NO: 27955 - DNA, 20 bp, Artificial Sequence
  Chr1p_10 Reverse Primer
cctggggtttccaataacaa

SEQ ID NO: 27956 - DNA, 20 bp, Artificial Sequence
  Chr1p_10 Reverse Primer
gagtcagagggatggtcctg

SEQ ID NO: 27957 - DNA, 20 bp, Artificial Sequence
  Chr1p_10 Reverse Primer
gggctcgcatgctagttaca

SEQ ID NO: 27958 - DNA, 20 bp, Artificial Sequence
  Chr1p_10 Reverse Primer
ctgagatggtaaagcctggg

SEQ ID NO: 27959 - DNA, 20 bp, Artificial Sequence
  Chr1p_10 Reverse Primer
aagcagttggcatcaggaag

SEQ ID NO: 27960 - DNA, 21 bp, Artificial Sequence
  Chr1p_10 Reverse Primer
aagggcatgtgttcttttcaa

SEQ ID NO: 27961 - DNA, 20 bp, Artificial Sequence
  Chr1p_10 Reverse Primer
cagccactgctgcaaattct

SEQ ID NO: 27962 - DNA, 20 bp, Artificial Sequence
  Chr1p_10 Reverse Primer
atcaaatgatggtccccttg

SEQ ID NO: 27963 - DNA, 20 bp, Artificial Sequence
  Chr1p_10 Reverse Primer
ttctcctcctttgctccatc

SEQ ID NO: 27964 - DNA, 20 bp, Artificial Sequence
  Chr1p_10 Reverse Primer
gcatgggtaaaacgaagcat

SEQ ID NO: 27965 - DNA, 21 bp, Artificial Sequence
  Chr1p_10 Reverse Primer
ggctcttctagctgctgcttc

SEQ ID NO: 27966 - DNA, 20 bp, Artificial Sequence
  Chr1p_10 Reverse Primer
aagggagcagcaggtgtaaa

SEQ ID NO: 27967 - DNA, 20 bp, Artificial Sequence
  Chr1p_10 Reverse Primer
tctggcatttactccttccg

SEQ ID NO: 27968 - DNA, 23 bp, Artificial Sequence
  Chr1p_10 Reverse Primer
tggacacttatggtctctttttg

SEQ ID NO: 27969 - DNA, 20 bp, Artificial Sequence
  Chr1p_10 Reverse Primer
acctccctcctctggacaat

SEQ ID NO: 27970 - DNA, 20 bp, Artificial Sequence
  Chr1p_10 Reverse Primer
caaagctcaagctcccaaag

SEQ ID NO: 27971 - DNA, 20 bp, Artificial Sequence
  Chr1p_10 Reverse Primer
ccctacagggcacaaacaag

SEQ ID NO: 27972 - DNA, 20 bp, Artificial Sequence
  Chr1p_10 Reverse Primer
ccacctttcccttcatgcta

SEQ ID NO: 27973 - DNA, 20 bp, Artificial Sequence
  Chr1p_10 Reverse Primer
cccatttctctgggttttca

SEQ ID NO: 27974 - DNA, 20 bp, Artificial Sequence
  Chr1p_10 Reverse Primer
atgaaatccaaccacaaggc

SEQ ID NO: 27975 - DNA, 20 bp, Artificial Sequence
  Chr1p_10 Reverse Primer
acacgtcgtcatgctcttca

SEQ ID NO: 27976 - DNA, 20 bp, Artificial Sequence
  Chr1p_10 Reverse Primer
tggaacaatgcagcaaaaag

SEQ ID NO: 27977 - DNA, 20 bp, Artificial Sequence
  Chr1p_10 Reverse Primer
agacaggcaaaccagagtgg

SEQ ID NO: 27978 - DNA, 20 bp, Artificial Sequence
  Chr1p_10 Reverse Primer
ccctgacacatcacatctgg

SEQ ID NO: 27979 - DNA, 20 bp, Artificial Sequence
  Chr1p_10 Reverse Primer
taaggaccaagattcccgtg

SEQ ID NO: 27980 - DNA, 20 bp, Artificial Sequence
  Chr1p_10 Reverse Primer
aacaaccctgcagaacaagg

SEQ ID NO: 27981 - DNA, 20 bp, Artificial Sequence
  Chr1p_10 Reverse Primer
tcaggtctggagtgtttccc

SEQ ID NO: 27982 - DNA, 20 bp, Artificial Sequence
  Chr1p_10 Reverse Primer
ccacatcaccccacgttact

SEQ ID NO: 27983 - DNA, 20 bp, Artificial Sequence
  Chr1p_10 Reverse Primer
tatttggcgctctttccact

SEQ ID NO: 27984 - DNA, 20 bp, Artificial Sequence
  Chr1p_10 Reverse Primer
tggctcaactgtagcctgaa

SEQ ID NO: 27985 - DNA, 23 bp, Artificial Sequence
  Chr1p_10 Reverse Primer
tctgcaattctcttagaacacga

SEQ ID NO: 27986 - DNA, 20 bp, Artificial Sequence
  Chr1p_10 Reverse Primer
cactggagaaagaacctggc

SEQ ID NO: 27987 - DNA, 20 bp, Artificial Sequence
  Chr1p_10 Reverse Primer
tcatgcccgtgatgtaggta

SEQ ID NO: 27988 - DNA, 20 bp, Artificial Sequence
  Chr1p_10 Reverse Primer
atctgatgctgtggagaggg

SEQ ID NO: 27989 - DNA, 20 bp, Artificial Sequence
  Chr1p_10 Reverse Primer
tctcctcgttggaggttttg

SEQ ID NO: 27990 - DNA, 20 bp, Artificial Sequence
  Chr1p_10 Reverse Primer
atagcccccagagtttttgg

SEQ ID NO: 27991 - DNA, 20 bp, Artificial Sequence
  Chr1p_10 Reverse Primer
catgcaagaatccagcacat

SEQ ID NO: 27992 - DNA, 22 bp, Artificial Sequence
  Chr1p_10 Reverse Primer
ttgtcccttctcctaccaagaa

SEQ ID NO: 27993 - DNA, 20 bp, Artificial Sequence
  Chr1p_10 Reverse Primer
tatgcccctggatagtttgc

SEQ ID NO: 27994 - DNA, 25 bp, Artificial Sequence
  Chr1p_10 Reverse Primer
tgtgaaattgtgacatttaaaaagc

SEQ ID NO: 27995 - DNA, 20 bp, Artificial Sequence
  Chr1p_10 Reverse Primer
cagctgggaaaaatgagagc

SEQ ID NO: 27996 - DNA, 20 bp, Artificial Sequence
  Chr1p_10 Reverse Primer
tctacccccaagtccaaatg

SEQ ID NO: 27997 - DNA, 20 bp, Artificial Sequence
  Chr1p_10 Reverse Primer
gctctgaacaaagccctgag

SEQ ID NO: 27998 - DNA, 20 bp, Artificial Sequence
  Chr1p_10 Reverse Primer
aaaagtacggcaggcttcaa

SEQ ID NO: 27999 - DNA, 20 bp, Artificial Sequence
  Chr1p_10 Reverse Primer
tggtgctgtgacaaacaggt

SEQ ID NO: 28000 - DNA, 20 bp, Artificial Sequence
  Chr1p_10 Reverse Primer
aagtcaatgttgcctgcctt

SEQ ID NO: 28001 - DNA, 21 bp, Artificial Sequence
  Chr1p_11 Forward Primer
cctggaactcttcttccatcc

SEQ ID NO: 28002 - DNA, 21 bp, Artificial Sequence
  Chr1p_11 Forward Primer
catttttggaggtgcacattt

SEQ ID NO: 28003 - DNA, 20 bp, Artificial Sequence
  Chr1p_11 Forward Primer
aggtgagaacatatcgccca

SEQ ID NO: 28004 - DNA, 26 bp, Artificial Sequence
  Chr1p_11 Forward Primer
aaacccattgtatttttgttcttaaa

SEQ ID NO: 28005 - DNA, 20 bp, Artificial Sequence
  Chr1p_11 Forward Primer
cagctgggaactacctgtgg

SEQ ID NO: 28006 - DNA, 20 bp, Artificial Sequence
  Chr1p_11 Forward Primer
ttgtgtctggagccattcct

SEQ ID NO: 28007 - DNA, 21 bp, Artificial Sequence
  Chr1p_11 Forward Primer
tcgccatttatttgctttgtc

SEQ ID NO: 28008 - DNA, 23 bp, Artificial Sequence
  Chr1p_11 Forward Primer
tgtccattaatcagcattacacc

SEQ ID NO: 28009 - DNA, 20 bp, Artificial Sequence
  Chr1p_11 Forward Primer
tggcacaagggtaatgacaa

SEQ ID NO: 28010 - DNA, 20 bp, Artificial Sequence
  Chr1p_11 Forward Primer
acggatgcaagctcaatttt

SEQ ID NO: 28011 - DNA, 21 bp, Artificial Sequence
  Chr1p_11 Forward Primer
ggatggtagtgaggggtagga

SEQ ID NO: 28012 - DNA, 27 bp, Artificial Sequence
  Chr1p_11 Forward Primer
ttctttaaaggatatgccctataattc

SEQ ID NO: 28013 - DNA, 21 bp, Artificial Sequence
  Chr1p_11 Forward Primer
ctctgatattttccaaagccg

SEQ ID NO: 28014 - DNA, 20 bp, Artificial Sequence
  Chr1p_11 Forward Primer
aacacaaggtgccacacaga

SEQ ID NO: 28015 - DNA, 20 bp, Artificial Sequence
  Chr1p_11 Forward Primer
ccagttctttgcttctggga

SEQ ID NO: 28016 - DNA, 23 bp, Artificial Sequence
  Chr1p_11 Forward Primer
gcaagtaaggtttgaatgcaagt

SEQ ID NO: 28017 - DNA, 20 bp, Artificial Sequence
  Chr1p_11 Forward Primer
ttgctaaagcaacatggcag

SEQ ID NO: 28018 - DNA, 20 bp, Artificial Sequence
  Chr1p_11 Forward Primer
aagctggaatgcgctgtagt

SEQ ID NO: 28019 - DNA, 20 bp, Artificial Sequence
  Chr1p_11 Forward Primer
ttagcacccacttcctggag

SEQ ID NO: 28020 - DNA, 22 bp, Artificial Sequence
  Chr1p_11 Forward Primer
ggaaagcagtactgtgacaagg

SEQ ID NO: 28021 - DNA, 20 bp, Artificial Sequence
  Chr1p_11 Forward Primer
aattccaaggtgccctcttt

SEQ ID NO: 28022 - DNA, 20 bp, Artificial Sequence
  Chr1p_11 Forward Primer
tggagatgccctggactcta

SEQ ID NO: 28023 - DNA, 20 bp, Artificial Sequence
  Chr1p_11 Forward Primer
tttcacataaccctccccaa

SEQ ID NO: 28024 - DNA, 20 bp, Artificial Sequence
  Chr1p_11 Forward Primer
ccaatatgcggagaacaagg

SEQ ID NO: 28025 - DNA, 20 bp, Artificial Sequence
  Chr1p_11 Forward Primer
gcagacgaagtgcatgaaaa

SEQ ID NO: 28026 - DNA, 21 bp, Artificial Sequence
  Chr1p_11 Forward Primer
aagggaaggatctccatctga

SEQ ID NO: 28027 - DNA, 20 bp, Artificial Sequence
  Chr1p_11 Forward Primer
aggcacgctttgtagcactt

SEQ ID NO: 28028 - DNA, 20 bp, Artificial Sequence
  Chr1p_11 Forward Primer
caatgattcctggggaggta

SEQ ID NO: 28029 - DNA, 20 bp, Artificial Sequence
  Chr1p_11 Forward Primer
cccctcaggcctatttgact

SEQ ID NO: 28030 - DNA, 20 bp, Artificial Sequence
  Chr1p_11 Forward Primer
agatggagtcagttggccct

SEQ ID NO: 28031 - DNA, 20 bp, Artificial Sequence
  Chr1p_11 Forward Primer
agcaagtcatcctggggtta

SEQ ID NO: 28032 - DNA, 20 bp, Artificial Sequence
  Chr1p_11 Forward Primer
agccacctacctacccagtg

SEQ ID NO: 28033 - DNA, 22 bp, Artificial Sequence
  Chr1p_11 Forward Primer
tgaaattactagcctccaaggg

SEQ ID NO: 28034 - DNA, 25 bp, Artificial Sequence
  Chr1p_11 Forward Primer
gagtcactgaaatccattttgtagg

SEQ ID NO: 28035 - DNA, 20 bp, Artificial Sequence
  Chr1p_11 Forward Primer
ggctgtgtttatgcttggaa

SEQ ID NO: 28036 - DNA, 23 bp, Artificial Sequence
  Chr1p_11 Forward Primer
gctacatcttttaaagccttcca

SEQ ID NO: 28037 - DNA, 21 bp, Artificial Sequence
  Chr1p_11 Forward Primer
agggttgaacacaaacactgg

SEQ ID NO: 28038 - DNA, 21 bp, Artificial Sequence
  Chr1p_11 Forward Primer
ttaatctttcagatgccccaa

SEQ ID NO: 28039 - DNA, 20 bp, Artificial Sequence
  Chr1p_11 Forward Primer
gcaagcaatgttctccatga

SEQ ID NO: 28040 - DNA, 20 bp, Artificial Sequence
  Chr1p_11 Forward Primer
gcacccttgaaatcctgtct

SEQ ID NO: 28041 - DNA, 20 bp, Artificial Sequence
  Chr1p_11 Forward Primer
tgctcatccctctctctgtg

SEQ ID NO: 28042 - DNA, 20 bp, Artificial Sequence
  Chr1p_11 Forward Primer
atgtcaaattcattgcagcc

SEQ ID NO: 28043 - DNA, 21 bp, Artificial Sequence
  Chr1p_11 Forward Primer
gaatggcatttcaattcctca

SEQ ID NO: 28044 - DNA, 20 bp, Artificial Sequence
  Chr1p_11 Forward Primer
ttgatttgtaagcggtgctc

SEQ ID NO: 28045 - DNA, 20 bp, Artificial Sequence
  Chr1p_11 Forward Primer
gttcccgtgggtatcctttt

SEQ ID NO: 28046 - DNA, 20 bp, Artificial Sequence
  Chr1p_11 Forward Primer
ccagtaggatgtggggagtg

SEQ ID NO: 28047 - DNA, 20 bp, Artificial Sequence
  Chr1p_11 Forward Primer
atgagaccaggtgagcttgg

SEQ ID NO: 28048 - DNA, 20 bp, Artificial Sequence
  Chr1p_11 Forward Primer
tttatcatcccctcatcccc

SEQ ID NO: 28049 - DNA, 21 bp, Artificial Sequence
  Chr1p_11 Forward Primer
ttgcttttcctcttccaatga

SEQ ID NO: 28050 - DNA, 22 bp, Artificial Sequence
  Chr1p_11 Forward Primer
gggatttttaggtcatcctagc

SEQ ID NO: 28051 - DNA, 20 bp, Artificial Sequence
  Chr1p_11 Forward Primer
ccctgaacagagtttggcac

SEQ ID NO: 28052 - DNA, 20 bp, Artificial Sequence
  Chr1p_11 Forward Primer
ctctcaggcttgcagagcta

SEQ ID NO: 28053 - DNA, 23 bp, Artificial Sequence
  Chr1p_11 Forward Primer
cctgagtgcattgactacattga

SEQ ID NO: 28054 - DNA, 20 bp, Artificial Sequence
  Chr1p_11 Forward Primer
tggaggacaggaaccaggta

SEQ ID NO: 28055 - DNA, 20 bp, Artificial Sequence
  Chr1p_11 Forward Primer
ataggttatggctttgggca

SEQ ID NO: 28056 - DNA, 20 bp, Artificial Sequence
  Chr1p_11 Forward Primer
tgcaaaggcagattaaagca

SEQ ID NO: 28057 - DNA, 20 bp, Artificial Sequence
  Chr1p_11 Forward Primer
aaaccatggcaagcagactt

SEQ ID NO: 28058 - DNA, 25 bp, Artificial Sequence
  Chr1p_11 Forward Primer
tgaggaattaggctatacaagagca

SEQ ID NO: 28059 - DNA, 20 bp, Artificial Sequence
  Chr1p_11 Forward Primer
catccccaaatttcaccaac

SEQ ID NO: 28060 - DNA, 20 bp, Artificial Sequence
  Chr1p_11 Forward Primer
accatttaaggtagtgcgcc

SEQ ID NO: 28061 - DNA, 25 bp, Artificial Sequence
  Chr1p_11 Forward Primer
tggctatacataaaatccacttcaa

SEQ ID NO: 28062 - DNA, 20 bp, Artificial Sequence
  Chr1p_11 Forward Primer
gcgaaaaggacaaaccaaaa

SEQ ID NO: 28063 - DNA, 21 bp, Artificial Sequence
  Chr1p_11 Forward Primer
tgatccagcaattctactggg

SEQ ID NO: 28064 - DNA, 20 bp, Artificial Sequence
  Chr1p_11 Forward Primer
aagatagcacattggggtgc

SEQ ID NO: 28065 - DNA, 20 bp, Artificial Sequence
  Chr1p_11 Forward Primer
ggtaccaggttggaggaaca

SEQ ID NO: 28066 - DNA, 20 bp, Artificial Sequence
  Chr1p_11 Forward Primer
catgaggcctttctagaccc

SEQ ID NO: 28067 - DNA, 20 bp, Artificial Sequence
  Chr1p_11 Forward Primer
tagttagcttggccacccac

SEQ ID NO: 28068 - DNA, 20 bp, Artificial Sequence
  Chr1p_11 Forward Primer
tcagatgagattgccctcaa

SEQ ID NO: 28069 - DNA, 21 bp, Artificial Sequence
  Chr1p_11 Forward Primer
aaggagagtacacaccagcca

SEQ ID NO: 28070 - DNA, 20 bp, Artificial Sequence
  Chr1p_11 Forward Primer
gaaacagcatactggccaca

SEQ ID NO: 28071 - DNA, 21 bp, Artificial Sequence
  Chr1p_11 Forward Primer
gcaaatgcaatgttaacagga

SEQ ID NO: 28072 - DNA, 21 bp, Artificial Sequence
  Chr1p_11 Forward Primer
tgtgttaaatgatggggaaga

SEQ ID NO: 28073 - DNA, 20 bp, Artificial Sequence
  Chr1p_11 Forward Primer
cccctgcaatggaaagtaga

SEQ ID NO: 28074 - DNA, 20 bp, Artificial Sequence
  Chr1p_11 Forward Primer
tgcctgcctcatagaaatcc

SEQ ID NO: 28075 - DNA, 20 bp, Artificial Sequence
  Chr1p_11 Forward Primer
ggcatccaaagcgataagaa

SEQ ID NO: 28076 - DNA, 20 bp, Artificial Sequence
  Chr1p_11 Forward Primer
ttccttgaacaagtggtgga

SEQ ID NO: 28077 - DNA, 20 bp, Artificial Sequence
  Chr1p_11 Forward Primer
ggctatgcatctcttcctgg

SEQ ID NO: 28078 - DNA, 22 bp, Artificial Sequence
  Chr1p_11 Forward Primer
catgtggctaaagctttgtgag

SEQ ID NO: 28079 - DNA, 20 bp, Artificial Sequence
  Chr1p_11 Forward Primer
aaccaagcacttggctgaat

SEQ ID NO: 28080 - DNA, 20 bp, Artificial Sequence
  Chr1p_11 Forward Primer
catctctgcaggccactgta

SEQ ID NO: 28081 - DNA, 20 bp, Artificial Sequence
  Chr1p_11 Forward Primer
ccaaaactggctgtttccat

SEQ ID NO: 28082 - DNA, 20 bp, Artificial Sequence
  Chr1p_11 Forward Primer
tgttctgaccagcaaaatgg

SEQ ID NO: 28083 - DNA, 20 bp, Artificial Sequence
  Chr1p_11 Forward Primer
attgccacttgtccttttgg

SEQ ID NO: 28084 - DNA, 20 bp, Artificial Sequence
  Chr1p_11 Forward Primer
gcaagcccaccaaattacaa

SEQ ID NO: 28085 - DNA, 20 bp, Artificial Sequence
  Chr1p_11 Forward Primer
gtgcttcagggaaaagcaag

SEQ ID NO: 28086 - DNA, 24 bp, Artificial Sequence
  Chr1p_11 Forward Primer
tgaaagatcaaattgagttgcata

SEQ ID NO: 28087 - DNA, 20 bp, Artificial Sequence
  Chr1p_11 Forward Primer
aagtgcacatgcatttaggc

SEQ ID NO: 28088 - DNA, 20 bp, Artificial Sequence
  Chr1p_11 Forward Primer
ggatggaaacatgccaaata

SEQ ID NO: 28089 - DNA, 21 bp, Artificial Sequence
  Chr1p_11 Forward Primer
gcaatgaattaaaagctgcca

SEQ ID NO: 28090 - DNA, 21 bp, Artificial Sequence
  Chr1p_11 Forward Primer
tgatattgatccctgttccca

SEQ ID NO: 28091 - DNA, 21 bp, Artificial Sequence
  Chr1p_11 Forward Primer
caatgaagtctttgctcctgg

SEQ ID NO: 28092 - DNA, 20 bp, Artificial Sequence
  Chr1p_11 Forward Primer
aagcctatcagcagcaggag

SEQ ID NO: 28093 - DNA, 21 bp, Artificial Sequence
  Chr1p_11 Forward Primer
ccttccagtcactaccgagag

SEQ ID NO: 28094 - DNA, 23 bp, Artificial Sequence
  Chr1p_11 Forward Primer
cagcatgcttattcatttcattg

SEQ ID NO: 28095 - DNA, 21 bp, Artificial Sequence
  Chr1p_11 Forward Primer
gagttttccattagagctggc

SEQ ID NO: 28096 - DNA, 20 bp, Artificial Sequence
  Chr1p_11 Forward Primer
tggacatgcttggtttttca

SEQ ID NO: 28097 - DNA, 20 bp, Artificial Sequence
  Chr1p_11 Reverse Primer
gagaagcatcaatttcccca

SEQ ID NO: 28098 - DNA, 21 bp, Artificial Sequence
  Chr1p_11 Reverse Primer
aagaggcagtaggttcccaaa

SEQ ID NO: 28099 - DNA, 20 bp, Artificial Sequence
  Chr1p_11 Reverse Primer
acacccttcccatgcagtag

SEQ ID NO: 28100 - DNA, 20 bp, Artificial Sequence
  Chr1p_11 Reverse Primer
caaaagcattaattccccca

SEQ ID NO: 28101 - DNA, 20 bp, Artificial Sequence
  Chr1p_11 Reverse Primer
aggcgaactgaagaaggaca

SEQ ID NO: 28102 - DNA, 23 bp, Artificial Sequence
  Chr1p_11 Reverse Primer
tcagaatctctaggtatccaccg

SEQ ID NO: 28103 - DNA, 20 bp, Artificial Sequence
  Chr1p_11 Reverse Primer
caatggaggaggcaaacatt

SEQ ID NO: 28104 - DNA, 20 bp, Artificial Sequence
  Chr1p_11 Reverse Primer
tcctgggggagaagaaaagt

SEQ ID NO: 28105 - DNA, 20 bp, Artificial Sequence
  Chr1p_11 Reverse Primer
aaagaatggatatgctgcgg

SEQ ID NO: 28106 - DNA, 21 bp, Artificial Sequence
  Chr1p_11 Reverse Primer
tgacaatgtgaaaggtgcaaa

SEQ ID NO: 28107 - DNA, 20 bp, Artificial Sequence
  Chr1p_11 Reverse Primer
aagggaaggtgaaaccaaca

SEQ ID NO: 28108 - DNA, 20 bp, Artificial Sequence
  Chr1p_11 Reverse Primer
tggccactgttcatttagca

SEQ ID NO: 28109 - DNA, 20 bp, Artificial Sequence
  Chr1p_11 Reverse Primer
catggtaggagacctggagc

SEQ ID NO: 28110 - DNA, 20 bp, Artificial Sequence
  Chr1p_11 Reverse Primer
ggcttgggtcacaaaagtct

SEQ ID NO: 28111 - DNA, 21 bp, Artificial Sequence
  Chr1p_11 Reverse Primer
tgaaattgtgctgagatggaa

SEQ ID NO: 28112 - DNA, 27 bp, Artificial Sequence
  Chr1p_11 Reverse Primer
ttcagttttccaatatctagtcaacaa

SEQ ID NO: 28113 - DNA, 20 bp, Artificial Sequence
  Chr1p_11 Reverse Primer
ttccaactgcttcctctgct

SEQ ID NO: 28114 - DNA, 20 bp, Artificial Sequence
  Chr1p_11 Reverse Primer
tttggaatgctggtttgtga

SEQ ID NO: 28115 - DNA, 20 bp, Artificial Sequence
  Chr1p_11 Reverse Primer
gcatgaagtggcaaagatga

SEQ ID NO: 28116 - DNA, 20 bp, Artificial Sequence
  Chr1p_11 Reverse Primer
tatattggcaggaccttggg

SEQ ID NO: 28117 - DNA, 20 bp, Artificial Sequence
  Chr1p_11 Reverse Primer
tctgtaccctcctcctctgc

SEQ ID NO: 28118 - DNA, 21 bp, Artificial Sequence
  Chr1p_11 Reverse Primer
tgcaaagactcttgccagttt

SEQ ID NO: 28119 - DNA, 22 bp, Artificial Sequence
  Chr1p_11 Reverse Primer
gatgacatctggaacagcaact

SEQ ID NO: 28120 - DNA, 20 bp, Artificial Sequence
  Chr1p_11 Reverse Primer
tgctgttccctgaccctcta

SEQ ID NO: 28121 - DNA, 20 bp, Artificial Sequence
  Chr1p_11 Reverse Primer
attcagcacctcactcccac

SEQ ID NO: 28122 - DNA, 24 bp, Artificial Sequence
  Chr1p_11 Reverse Primer
ccaggacctattagcaagaagaga

SEQ ID NO: 28123 - DNA, 19 bp, Artificial Sequence
  Chr1p_11 Reverse Primer
cgagctacctgctcatgga

SEQ ID NO: 28124 - DNA, 20 bp, Artificial Sequence
  Chr1p_11 Reverse Primer
gactggggagaaaatggtca

SEQ ID NO: 28125 - DNA, 20 bp, Artificial Sequence
  Chr1p_11 Reverse Primer
agtagaggagccagccatca

SEQ ID NO: 28126 - DNA, 20 bp, Artificial Sequence
  Chr1p_11 Reverse Primer
acgttcactagatgcccagc

SEQ ID NO: 28127 - DNA, 20 bp, Artificial Sequence
  Chr1p_11 Reverse Primer
cgacagagctcattccatcc

SEQ ID NO: 28128 - DNA, 20 bp, Artificial Sequence
  Chr1p_11 Reverse Primer
tttacatggcgactccttca

SEQ ID NO: 28129 - DNA, 24 bp, Artificial Sequence
  Chr1p_11 Reverse Primer
ggaactgaatggtatgttgttttg

SEQ ID NO: 28130 - DNA, 20 bp, Artificial Sequence
  Chr1p_11 Reverse Primer
acatcagctgcgaacttgtg

SEQ ID NO: 28131 - DNA, 20 bp, Artificial Sequence
  Chr1p_11 Reverse Primer
ctctgcatctgtgttgccat

SEQ ID NO: 28132 - DNA, 22 bp, Artificial Sequence
  Chr1p_11 Reverse Primer
aactgttgctgttcaaatacgg

SEQ ID NO: 28133 - DNA, 21 bp, Artificial Sequence
  Chr1p_11 Reverse Primer
ccatgtcacatccatatctgc

SEQ ID NO: 28134 - DNA, 21 bp, Artificial Sequence
  Chr1p_11 Reverse Primer
ttggtatggaacagaaatggg

SEQ ID NO: 28135 - DNA, 20 bp, Artificial Sequence
  Chr1p_11 Reverse Primer
accagagtggatatgctggg

SEQ ID NO: 28136 - DNA, 20 bp, Artificial Sequence
  Chr1p_11 Reverse Primer
aagagccagctgaacagacc

SEQ ID NO: 28137 - DNA, 20 bp, Artificial Sequence
  Chr1p_11 Reverse Primer
ggtcaattgcctcaagctgt

SEQ ID NO: 28138 - DNA, 20 bp, Artificial Sequence
  Chr1p_11 Reverse Primer
caaattgtgcatgacttggg

SEQ ID NO: 28139 - DNA, 23 bp, Artificial Sequence
  Chr1p_11 Reverse Primer
cacaatgacttgaaaatctgtgg

SEQ ID NO: 28140 - DNA, 20 bp, Artificial Sequence
  Chr1p_11 Reverse Primer
ggctaaaatgagaggggttg

SEQ ID NO: 28141 - DNA, 20 bp, Artificial Sequence
  Chr1p_11 Reverse Primer
gggtgcatagagagggtcac

SEQ ID NO: 28142 - DNA, 20 bp, Artificial Sequence
  Chr1p_11 Reverse Primer
tgagcgaggtagtctagggg

SEQ ID NO: 28143 - DNA, 20 bp, Artificial Sequence
  Chr1p_11 Reverse Primer
taaattagacggccctggtg

SEQ ID NO: 28144 - DNA, 20 bp, Artificial Sequence
  Chr1p_11 Reverse Primer
caaattgaccacaggggaaa

SEQ ID NO: 28145 - DNA, 22 bp, Artificial Sequence
  Chr1p_11 Reverse Primer
caagtgcaaagggtctaagaaa

SEQ ID NO: 28146 - DNA, 24 bp, Artificial Sequence
  Chr1p_11 Reverse Primer
cagatgttaacaaggaaagcaaga

SEQ ID NO: 28147 - DNA, 23 bp, Artificial Sequence
  Chr1p_11 Reverse Primer
tccattttatccattacaatgcc

SEQ ID NO: 28148 - DNA, 20 bp, Artificial Sequence
  Chr1p_11 Reverse Primer
cccaagaggaagacgtgact

SEQ ID NO: 28149 - DNA, 21 bp, Artificial Sequence
  Chr1p_11 Reverse Primer
aattcaatccagcaccaattt

SEQ ID NO: 28150 - DNA, 20 bp, Artificial Sequence
  Chr1p_11 Reverse Primer
atccaacctgctcaccagaa

SEQ ID NO: 28151 - DNA, 25 bp, Artificial Sequence
  Chr1p_11 Reverse Primer
gctctgatgtaagtcttaggaaagg

SEQ ID NO: 28152 - DNA, 20 bp, Artificial Sequence
  Chr1p_11 Reverse Primer
catatggacttgcatccctg

SEQ ID NO: 28153 - DNA, 20 bp, Artificial Sequence
  Chr1p_11 Reverse Primer
gtgctccctcacatttggat

SEQ ID NO: 28154 - DNA, 21 bp, Artificial Sequence
  Chr1p_11 Reverse Primer
gaccatttttgtgcaagttga

SEQ ID NO: 28155 - DNA, 20 bp, Artificial Sequence
  Chr1p_11 Reverse Primer
cctgcaatgagtagtgagca

SEQ ID NO: 28156 - DNA, 20 bp, Artificial Sequence
  Chr1p_11 Reverse Primer
ggccagaagtcctagcaaaa

SEQ ID NO: 28157 - DNA, 21 bp, Artificial Sequence
  Chr1p_11 Reverse Primer
ttgcctttcacattaatgcct

SEQ ID NO: 28158 - DNA, 23 bp, Artificial Sequence
  Chr1p_11 Reverse Primer
tccctgttgaagtcataatttgc

SEQ ID NO: 28159 - DNA, 21 bp, Artificial Sequence
  Chr1p_11 Reverse Primer
aagcttcatccattttccaga

SEQ ID NO: 28160 - DNA, 20 bp, Artificial Sequence
  Chr1p_11 Reverse Primer
ccataggaactcctgccatc

SEQ ID NO: 28161 - DNA, 20 bp, Artificial Sequence
  Chr1p_11 Reverse Primer
ggcatcacattttccctgat

SEQ ID NO: 28162 - DNA, 20 bp, Artificial Sequence
  Chr1p_11 Reverse Primer
taaaaacctccgaaatgggg

SEQ ID NO: 28163 - DNA, 20 bp, Artificial Sequence
  Chr1p_11 Reverse Primer
tgtgcaaacactccagggta

SEQ ID NO: 28164 - DNA, 25 bp, Artificial Sequence
  Chr1p_11 Reverse Primer
tgaacttctatcaagagcaaaatct

SEQ ID NO: 28165 - DNA, 20 bp, Artificial Sequence
  Chr1p_11 Reverse Primer
agtatccactttccccttgc

SEQ ID NO: 28166 - DNA, 20 bp, Artificial Sequence
  Chr1p_11 Reverse Primer
ggaaatcagtccctccatca

SEQ ID NO: 28167 - DNA, 21 bp, Artificial Sequence
  Chr1p_11 Reverse Primer
tggctcaacaaacattttcag

SEQ ID NO: 28168 - DNA, 20 bp, Artificial Sequence
  Chr1p_11 Reverse Primer
tgatgacaggcgtttgagag

SEQ ID NO: 28169 - DNA, 20 bp, Artificial Sequence
  Chr1p_11 Reverse Primer
aaatcccgtaactgctgctg

SEQ ID NO: 28170 - DNA, 20 bp, Artificial Sequence
  Chr1p_11 Reverse Primer
tccattcacaaaggtccctc

SEQ ID NO: 28171 - DNA, 20 bp, Artificial Sequence
  Chr1p_11 Reverse Primer
gttgcttccacgttaagcct

SEQ ID NO: 28172 - DNA, 20 bp, Artificial Sequence
  Chr1p_11 Reverse Primer
accctggctccagttttcat

SEQ ID NO: 28173 - DNA, 20 bp, Artificial Sequence
  Chr1p_11 Reverse Primer
tttgtctgcccatcataacg

SEQ ID NO: 28174 - DNA, 20 bp, Artificial Sequence
  Chr1p_11 Reverse Primer
ggaagggttggaaacaggag

SEQ ID NO: 28175 - DNA, 20 bp, Artificial Sequence
  Chr1p_11 Reverse Primer
ccaggtaagtgtggtgggaa

SEQ ID NO: 28176 - DNA, 20 bp, Artificial Sequence
  Chr1p_11 Reverse Primer
tcctcaagcacataaacgca

SEQ ID NO: 28177 - DNA, 19 bp, Artificial Sequence
  Chr1p_11 Reverse Primer
aaatgaactgcctgcctcc

SEQ ID NO: 28178 - DNA, 20 bp, Artificial Sequence
  Chr1p_11 Reverse Primer
aagccaagtcgggaagagat

SEQ ID NO: 28179 - DNA, 20 bp, Artificial Sequence
  Chr1p_11 Reverse Primer
actccagcacaatgaaaccc

SEQ ID NO: 28180 - DNA, 20 bp, Artificial Sequence
  Chr1p_11 Reverse Primer
tttcttctactttgccccca

SEQ ID NO: 28181 - DNA, 25 bp, Artificial Sequence
  Chr1p_11 Reverse Primer
ttctcaaagcaaacaagtaaacaaa

SEQ ID NO: 28182 - DNA, 25 bp, Artificial Sequence
  Chr1p_11 Reverse Primer
catattaaattcaaataagccacga

SEQ ID NO: 28183 - DNA, 21 bp, Artificial Sequence
  Chr1p_11 Reverse Primer
tgaatggaacacatcgacttt

SEQ ID NO: 28184 - DNA, 20 bp, Artificial Sequence
  Chr1p_11 Reverse Primer
gcagctcatatgcccacatt

SEQ ID NO: 28185 - DNA, 21 bp, Artificial Sequence
  Chr1p_11 Reverse Primer
gggaatggttcacagacaact

SEQ ID NO: 28186 - DNA, 21 bp, Artificial Sequence
  Chr1p_11 Reverse Primer
gctagcatcagtacaggcagg

SEQ ID NO: 28187 - DNA, 20 bp, Artificial Sequence
  Chr1p_11 Reverse Primer
cggagcttcaccttcttcag

SEQ ID NO: 28188 - DNA, 20 bp, Artificial Sequence
  Chr1p_11 Reverse Primer
gggtttcgctcaaaatcctt

SEQ ID NO: 28189 - DNA, 22 bp, Artificial Sequence
  Chr1p_11 Reverse Primer
tgaaagtccagcaatgaagatg

SEQ ID NO: 28190 - DNA, 20 bp, Artificial Sequence
  Chr1p_11 Reverse Primer
tgctggaaattgtttggaca

SEQ ID NO: 28191 - DNA, 20 bp, Artificial Sequence
  Chr1p_11 Reverse Primer
gttggtcagctgagacagca

SEQ ID NO: 28192 - DNA, 20 bp, Artificial Sequence
  Chr1p_11 Reverse Primer
caagagcccagaatcagacc

SEQ ID NO: 28193 - DNA, 20 bp, Artificial Sequence
  Chr1p_12 Forward Primer
acacacaatgtgatgctggc

SEQ ID NO: 28194 - DNA, 20 bp, Artificial Sequence
  Chr1p_12 Forward Primer
tttctttgatgcaggaaggg

SEQ ID NO: 28195 - DNA, 20 bp, Artificial Sequence
  Chr1p_12 Forward Primer
gttttcacagcggctatggt

SEQ ID NO: 28196 - DNA, 21 bp, Artificial Sequence
  Chr1p_12 Forward Primer
tgagaaaaattaccactgccg

SEQ ID NO: 28197 - DNA, 22 bp, Artificial Sequence
  Chr1p_12 Forward Primer
tcagggatgcatacaatgtttt

SEQ ID NO: 28198 - DNA, 23 bp, Artificial Sequence
  Chr1p_12 Forward Primer
gcatggaagtctgactaaaagga

SEQ ID NO: 28199 - DNA, 20 bp, Artificial Sequence
  Chr1p_12 Forward Primer
atcagacccagttggcagtc

SEQ ID NO: 28200 - DNA, 20 bp, Artificial Sequence
  Chr1p_12 Forward Primer
gagctgcagaaacaacacca

SEQ ID NO: 28201 - DNA, 20 bp, Artificial Sequence
  Chr1p_12 Forward Primer
acctgcctcacgtctgagtt

SEQ ID NO: 28202 - DNA, 20 bp, Artificial Sequence
  Chr1p_12 Forward Primer
gggagatgctttccttaggc

SEQ ID NO: 28203 - DNA, 20 bp, Artificial Sequence
  Chr1p_12 Forward Primer
ccctgcaccctgtctctcta

SEQ ID NO: 28204 - DNA, 20 bp, Artificial Sequence
  Chr1p_12 Forward Primer
aagctgaaaaccactgggtg

SEQ ID NO: 28205 - DNA, 20 bp, Artificial Sequence
  Chr1p_12 Forward Primer
cccttctctctctgccattg

SEQ ID NO: 28206 - DNA, 20 bp, Artificial Sequence
  Chr1p_12 Forward Primer
gaccacactgttttggggac

SEQ ID NO: 28207 - DNA, 20 bp, Artificial Sequence
  Chr1p_12 Forward Primer
gcagactttgaccccattgt

SEQ ID NO: 28208 - DNA, 20 bp, Artificial Sequence
  Chr1p_12 Forward Primer
gggaggagtcaaccaaatga

SEQ ID NO: 28209 - DNA, 21 bp, Artificial Sequence
  Chr1p_12 Forward Primer
gcagcattcatttaggcaaac

SEQ ID NO: 28210 - DNA, 20 bp, Artificial Sequence
  Chr1p_12 Forward Primer
ccccaaaatcccaatgaata

SEQ ID NO: 28211 - DNA, 21 bp, Artificial Sequence
  Chr1p_12 Forward Primer
ggcatatgaaatcatttggga

SEQ ID NO: 28212 - DNA, 20 bp, Artificial Sequence
  Chr1p_12 Forward Primer
accacagaagaccatttggc

SEQ ID NO: 28213 - DNA, 20 bp, Artificial Sequence
  Chr1p_12 Forward Primer
ggaaattgctacctgtggga

SEQ ID NO: 28214 - DNA, 20 bp, Artificial Sequence
  Chr1p_12 Forward Primer
tcccctaaggagttgcagaa

SEQ ID NO: 28215 - DNA, 23 bp, Artificial Sequence
  Chr1p_12 Forward Primer
aaaattgaagtccaaggagatga

SEQ ID NO: 28216 - DNA, 20 bp, Artificial Sequence
  Chr1p_12 Forward Primer
agctttcagctgttcccaaa

SEQ ID NO: 28217 - DNA, 20 bp, Artificial Sequence
  Chr1p_12 Forward Primer
cagccttgctggaggataaa

SEQ ID NO: 28218 - DNA, 20 bp, Artificial Sequence
  Chr1p_12 Forward Primer
atttgcagaactggtgggtt

SEQ ID NO: 28219 - DNA, 20 bp, Artificial Sequence
  Chr1p_12 Forward Primer
acgattttgtgggagtctgg

SEQ ID NO: 28220 - DNA, 20 bp, Artificial Sequence
  Chr1p_12 Forward Primer
gcaggtgggagctaagagtg

SEQ ID NO: 28221 - DNA, 20 bp, Artificial Sequence
  Chr1p_12 Forward Primer
tctccctttctttgggttgg

SEQ ID NO: 28222 - DNA, 20 bp, Artificial Sequence
  Chr1p_12 Forward Primer
tagctcctctgactaccgcc

SEQ ID NO: 28223 - DNA, 20 bp, Artificial Sequence
  Chr1p_12 Forward Primer
gttgcctactttgttgggga

SEQ ID NO: 28224 - DNA, 20 bp, Artificial Sequence
  Chr1p_12 Forward Primer
atttcatctgcccgagtttg

SEQ ID NO: 28225 - DNA, 20 bp, Artificial Sequence
  Chr1p_12 Forward Primer
gcatttcttttgcccatctt

SEQ ID NO: 28226 - DNA, 20 bp, Artificial Sequence
  Chr1p_12 Forward Primer
ccattgtcttgtccacatgc

SEQ ID NO: 28227 - DNA, 21 bp, Artificial Sequence
  Chr1p_12 Forward Primer
tcattgcctaaggtgttcctg

SEQ ID NO: 28228 - DNA, 20 bp, Artificial Sequence
  Chr1p_12 Forward Primer
tatacctgcttacccagcgg

SEQ ID NO: 28229 - DNA, 20 bp, Artificial Sequence
  Chr1p_12 Forward Primer
cccaaacccgtgatcagtat

SEQ ID NO: 28230 - DNA, 20 bp, Artificial Sequence
  Chr1p_12 Forward Primer
tctgactaagctgggccaat

SEQ ID NO: 28231 - DNA, 20 bp, Artificial Sequence
  Chr1p_12 Forward Primer
ctgctcctgcatttgaaaca

SEQ ID NO: 28232 - DNA, 20 bp, Artificial Sequence
  Chr1p_12 Forward Primer
agagtgagtcccctggttga

SEQ ID NO: 28233 - DNA, 20 bp, Artificial Sequence
  Chr1p_12 Forward Primer
gaggtctcctccccatagga

SEQ ID NO: 28234 - DNA, 20 bp, Artificial Sequence
  Chr1p_12 Forward Primer
aacactgtgggtgtgaacga

SEQ ID NO: 28235 - DNA, 20 bp, Artificial Sequence
  Chr1p_12 Forward Primer
aagaaagaaaggctagcgcc

SEQ ID NO: 28236 - DNA, 21 bp, Artificial Sequence
  Chr1p_12 Forward Primer
ccctgtcagcctcttctaagg

SEQ ID NO: 28237 - DNA, 20 bp, Artificial Sequence
  Chr1p_12 Forward Primer
aggcaggctccttacctttc

SEQ ID NO: 28238 - DNA, 20 bp, Artificial Sequence
  Chr1p_12 Forward Primer
gtccctagctcccaccctac

SEQ ID NO: 28239 - DNA, 20 bp, Artificial Sequence
  Chr1p_12 Forward Primer
gacagcagagcccattcttc

SEQ ID NO: 28240 - DNA, 20 bp, Artificial Sequence
  Chr1p_12 Forward Primer
attttcccatcccactcctt

SEQ ID NO: 28241 - DNA, 20 bp, Artificial Sequence
  Chr1p_12 Forward Primer
tgcaccataccacatgctct

SEQ ID NO: 28242 - DNA, 20 bp, Artificial Sequence
  Chr1p_12 Forward Primer
atcttggaggcccaatttct

SEQ ID NO: 28243 - DNA, 20 bp, Artificial Sequence
  Chr1p_12 Forward Primer
tgctctgaccactggcttta

SEQ ID NO: 28244 - DNA, 20 bp, Artificial Sequence
  Chr1p_12 Forward Primer
ggctcagaagcttaagtcgc

SEQ ID NO: 28245 - DNA, 20 bp, Artificial Sequence
  Chr1p_12 Forward Primer
aattaagaagcatggtgcgg

SEQ ID NO: 28246 - DNA, 21 bp, Artificial Sequence
  Chr1p_12 Forward Primer
ggataaaccttcaggactggc

SEQ ID NO: 28247 - DNA, 20 bp, Artificial Sequence
  Chr1p_12 Forward Primer
tggaagtcctcaagcgtaca

SEQ ID NO: 28248 - DNA, 20 bp, Artificial Sequence
  Chr1p_12 Forward Primer
caccaccacacacatgttca

SEQ ID NO: 28249 - DNA, 20 bp, Artificial Sequence
  Chr1p_12 Forward Primer
gcatacaggccctcaagtgt

SEQ ID NO: 28250 - DNA, 20 bp, Artificial Sequence
  Chr1p_12 Forward Primer
agctgtggtacctcaccatt

SEQ ID NO: 28251 - DNA, 20 bp, Artificial Sequence
  Chr1p_12 Forward Primer
atccaggtgaggaagctgaa

SEQ ID NO: 28252 - DNA, 20 bp, Artificial Sequence
  Chr1p_12 Forward Primer
aaagggtaggggagatggag

SEQ ID NO: 28253 - DNA, 20 bp, Artificial Sequence
  Chr1p_12 Forward Primer
tggctgttgtgcagattctc

SEQ ID NO: 28254 - DNA, 22 bp, Artificial Sequence
  Chr1p_12 Forward Primer
cagaccacaaaaaggaaacaaa

SEQ ID NO: 28255 - DNA, 20 bp, Artificial Sequence
  Chr1p_12 Forward Primer
caagttagaagtggtggggc

SEQ ID NO: 28256 - DNA, 21 bp, Artificial Sequence
  Chr1p_12 Forward Primer
tgcaaaacaacagaaccatca

SEQ ID NO: 28257 - DNA, 20 bp, Artificial Sequence
  Chr1p_12 Forward Primer
cctctttcaacatcaagggc

SEQ ID NO: 28258 - DNA, 20 bp, Artificial Sequence
  Chr1p_12 Forward Primer
agccagggctagagagacaa

SEQ ID NO: 28259 - DNA, 20 bp, Artificial Sequence
  Chr1p_12 Forward Primer
ttcccaacttgctcattcct

SEQ ID NO: 28260 - DNA, 20 bp, Artificial Sequence
  Chr1p_12 Forward Primer
ttcaggggtgtttcaggaag

SEQ ID NO: 28261 - DNA, 20 bp, Artificial Sequence
  Chr1p_12 Forward Primer
aagcaaagattccctgctca

SEQ ID NO: 28262 - DNA, 20 bp, Artificial Sequence
  Chr1p_12 Forward Primer
acacttgcacgccattgtta

SEQ ID NO: 28263 - DNA, 20 bp, Artificial Sequence
  Chr1p_12 Forward Primer
cttcagagtggggcataagg

SEQ ID NO: 28264 - DNA, 20 bp, Artificial Sequence
  Chr1p_12 Forward Primer
gctgggtcagagaaaccaag

SEQ ID NO: 28265 - DNA, 20 bp, Artificial Sequence
  Chr1p_12 Forward Primer
gggaaagaggacagagaggc

SEQ ID NO: 28266 - DNA, 20 bp, Artificial Sequence
  Chr1p_12 Forward Primer
tgcaccagactgagcaactc

SEQ ID NO: 28267 - DNA, 20 bp, Artificial Sequence
  Chr1p_12 Forward Primer
cttcagtgaatcaggtggca

SEQ ID NO: 28268 - DNA, 20 bp, Artificial Sequence
  Chr1p_12 Forward Primer
gaatggcagccctcagtaag

SEQ ID NO: 28269 - DNA, 20 bp, Artificial Sequence
  Chr1p_12 Forward Primer
ctgaactccatcagggaagc

SEQ ID NO: 28270 - DNA, 20 bp, Artificial Sequence
  Chr1p_12 Forward Primer
tgcagcttctcagaaaaccc

SEQ ID NO: 28271 - DNA, 20 bp, Artificial Sequence
  Chr1p_12 Forward Primer
cacttccccaaagccttaca

SEQ ID NO: 28272 - DNA, 20 bp, Artificial Sequence
  Chr1p_12 Forward Primer
aatccaaggagcccaagact

SEQ ID NO: 28273 - DNA, 20 bp, Artificial Sequence
  Chr1p_12 Forward Primer
ggggaaagagaagggttcag

SEQ ID NO: 28274 - DNA, 20 bp, Artificial Sequence
  Chr1p_12 Forward Primer
gtgagaatcaagggaaggca

SEQ ID NO: 28275 - DNA, 20 bp, Artificial Sequence
  Chr1p_12 Forward Primer
cagtcctaggcttctgggtg

SEQ ID NO: 28276 - DNA, 20 bp, Artificial Sequence
  Chr1p_12 Forward Primer
ggcactatgccaggtgtttt

SEQ ID NO: 28277 - DNA, 20 bp, Artificial Sequence
  Chr1p_12 Forward Primer
cctaggctgggccagatatt

SEQ ID NO: 28278 - DNA, 21 bp, Artificial Sequence
  Chr1p_12 Forward Primer
ccctctgctttgtatgaaagg

SEQ ID NO: 28279 - DNA, 20 bp, Artificial Sequence
  Chr1p_12 Forward Primer
ccttggctaccggtgtttta

SEQ ID NO: 28280 - DNA, 20 bp, Artificial Sequence
  Chr1p_12 Forward Primer
ttcgatgatcaattttggca

SEQ ID NO: 28281 - DNA, 20 bp, Artificial Sequence
  Chr1p_12 Forward Primer
gtcaggctgagttgatggct

SEQ ID NO: 28282 - DNA, 20 bp, Artificial Sequence
  Chr1p_12 Forward Primer
ccagtgaggaatcagaaggg

SEQ ID NO: 28283 - DNA, 20 bp, Artificial Sequence
  Chr1p_12 Forward Primer
ccacatgctctttccatcct

SEQ ID NO: 28284 - DNA, 20 bp, Artificial Sequence
  Chr1p_12 Forward Primer
gcccagagtagccagttcag

SEQ ID NO: 28285 - DNA, 20 bp, Artificial Sequence
  Chr1p_12 Forward Primer
aacgtgctccagaggagaaa

SEQ ID NO: 28286 - DNA, 20 bp, Artificial Sequence
  Chr1p_12 Forward Primer
aaccagtgctccacttccac

SEQ ID NO: 28287 - DNA, 24 bp, Artificial Sequence
  Chr1p_12 Forward Primer
ggaagtatccaaaagagactgtgg

SEQ ID NO: 28288 - DNA, 20 bp, Artificial Sequence
  Chr1p_12 Forward Primer
agccctctaagggccagata

SEQ ID NO: 28289 - DNA, 22 bp, Artificial Sequence
  Chr1p_12 Reverse Primer
cgacactttcttttggtgagtg

SEQ ID NO: 28290 - DNA, 20 bp, Artificial Sequence
  Chr1p_12 Reverse Primer
actcacaaatccaggccaag

SEQ ID NO: 28291 - DNA, 20 bp, Artificial Sequence
  Chr1p_12 Reverse Primer
cagtggtgctctttgcagac

SEQ ID NO: 28292 - DNA, 20 bp, Artificial Sequence
  Chr1p_12 Reverse Primer
tgggagaaggacacctcatc

SEQ ID NO: 28293 - DNA, 21 bp, Artificial Sequence
  Chr1p_12 Reverse Primer
ctcagcattttgccatacaca

SEQ ID NO: 28294 - DNA, 21 bp, Artificial Sequence
  Chr1p_12 Reverse Primer
aacttgctcttggagaccctt

SEQ ID NO: 28295 - DNA, 20 bp, Artificial Sequence
  Chr1p_12 Reverse Primer
ctgattcccaccaaccaact

SEQ ID NO: 28296 - DNA, 20 bp, Artificial Sequence
  Chr1p_12 Reverse Primer
atgctgtcatcccctgagaa

SEQ ID NO: 28297 - DNA, 20 bp, Artificial Sequence
  Chr1p_12 Reverse Primer
gcaggacccacctagtttga

SEQ ID NO: 28298 - DNA, 20 bp, Artificial Sequence
  Chr1p_12 Reverse Primer
ggggctgcaactcttacaaa

SEQ ID NO: 28299 - DNA, 20 bp, Artificial Sequence
  Chr1p_12 Reverse Primer
aagcttaggggatgccaaat

SEQ ID NO: 28300 - DNA, 20 bp, Artificial Sequence
  Chr1p_12 Reverse Primer
ggctatcagcagcagtgtca

SEQ ID NO: 28301 - DNA, 20 bp, Artificial Sequence
  Chr1p_12 Reverse Primer
gaagcctctcccttcgatct

SEQ ID NO: 28302 - DNA, 20 bp, Artificial Sequence
  Chr1p_12 Reverse Primer
atgaaagctgcagagggaga

SEQ ID NO: 28303 - DNA, 20 bp, Artificial Sequence
  Chr1p_12 Reverse Primer
agatgctggatagcattgcc

SEQ ID NO: 28304 - DNA, 20 bp, Artificial Sequence
  Chr1p_12 Reverse Primer
tacctgcaccccaatcaaat

SEQ ID NO: 28305 - DNA, 22 bp, Artificial Sequence
  Chr1p_12 Reverse Primer
tggaggtagaaatctccatttg

SEQ ID NO: 28306 - DNA, 20 bp, Artificial Sequence
  Chr1p_12 Reverse Primer
actagggctagccttcccat

SEQ ID NO: 28307 - DNA, 22 bp, Artificial Sequence
  Chr1p_12 Reverse Primer
tcaaaggcatgctctacaaaaa

SEQ ID NO: 28308 - DNA, 20 bp, Artificial Sequence
  Chr1p_12 Reverse Primer
ggattccacgaatacatgcc

SEQ ID NO: 28309 - DNA, 20 bp, Artificial Sequence
  Chr1p_12 Reverse Primer
actgcattgcttgttgggac

SEQ ID NO: 28310 - DNA, 20 bp, Artificial Sequence
  Chr1p_12 Reverse Primer
ttctctcccactcctgcttc

SEQ ID NO: 28311 - DNA, 20 bp, Artificial Sequence
  Chr1p_12 Reverse Primer
aacatgctgtctggatcacg

SEQ ID NO: 28312 - DNA, 20 bp, Artificial Sequence
  Chr1p_12 Reverse Primer
ggcagcttcaagaaaacagg

SEQ ID NO: 28313 - DNA, 20 bp, Artificial Sequence
  Chr1p_12 Reverse Primer
agcagacatagaccttccgc

SEQ ID NO: 28314 - DNA, 20 bp, Artificial Sequence
  Chr1p_12 Reverse Primer
aaagctactcaacggcctga

SEQ ID NO: 28315 - DNA, 20 bp, Artificial Sequence
  Chr1p_12 Reverse Primer
gcctcccactcactgtctgt

SEQ ID NO: 28316 - DNA, 20 bp, Artificial Sequence
  Chr1p_12 Reverse Primer
aggccattcctctcatcctt

SEQ ID NO: 28317 - DNA, 20 bp, Artificial Sequence
  Chr1p_12 Reverse Primer
gagaatctggattggggacc

SEQ ID NO: 28318 - DNA, 20 bp, Artificial Sequence
  Chr1p_12 Reverse Primer
tgactccaaaggaaatggct

SEQ ID NO: 28319 - DNA, 20 bp, Artificial Sequence
  Chr1p_12 Reverse Primer
gtgaatgcaagccctgtgta

SEQ ID NO: 28320 - DNA, 20 bp, Artificial Sequence
  Chr1p_12 Reverse Primer
ggaacttgtagagggggagg

SEQ ID NO: 28321 - DNA, 19 bp, Artificial Sequence
  Chr1p_12 Reverse Primer
cagcccttctggacacaat

SEQ ID NO: 28322 - DNA, 20 bp, Artificial Sequence
  Chr1p_12 Reverse Primer
acaccaggatccatagccag

SEQ ID NO: 28323 - DNA, 20 bp, Artificial Sequence
  Chr1p_12 Reverse Primer
cctttagggcagcatcagag

SEQ ID NO: 28324 - DNA, 20 bp, Artificial Sequence
  Chr1p_12 Reverse Primer
tctgcttgatggtgacaagg

SEQ ID NO: 28325 - DNA, 20 bp, Artificial Sequence
  Chr1p_12 Reverse Primer
tccaaaggacagggtcactc

SEQ ID NO: 28326 - DNA, 21 bp, Artificial Sequence
  Chr1p_12 Reverse Primer
gcttcgaatctgtgtgtttcc

SEQ ID NO: 28327 - DNA, 20 bp, Artificial Sequence
  Chr1p_12 Reverse Primer
acagttgatttgcaccgaca

SEQ ID NO: 28328 - DNA, 20 bp, Artificial Sequence
  Chr1p_12 Reverse Primer
tagtctacgtggggcctttg

SEQ ID NO: 28329 - DNA, 20 bp, Artificial Sequence
  Chr1p_12 Reverse Primer
ttcccacctgaacgtactcc

SEQ ID NO: 28330 - DNA, 20 bp, Artificial Sequence
  Chr1p_12 Reverse Primer
ccctgtgccttcttgttgtt

SEQ ID NO: 28331 - DNA, 20 bp, Artificial Sequence
  Chr1p_12 Reverse Primer
gagaccacagggaaggtgtg

SEQ ID NO: 28332 - DNA, 20 bp, Artificial Sequence
  Chr1p_12 Reverse Primer
gtgagccccaactcagactc

SEQ ID NO: 28333 - DNA, 20 bp, Artificial Sequence
  Chr1p_12 Reverse Primer
cccctaacagcaccaatcat

SEQ ID NO: 28334 - DNA, 20 bp, Artificial Sequence
  Chr1p_12 Reverse Primer
gtcaagctggacatggtgtg

SEQ ID NO: 28335 - DNA, 20 bp, Artificial Sequence
  Chr1p_12 Reverse Primer
cccagctctgtctgaccttc

SEQ ID NO: 28336 - DNA, 20 bp, Artificial Sequence
  Chr1p_12 Reverse Primer
ccctgggtgcattctatcat

SEQ ID NO: 28337 - DNA, 20 bp, Artificial Sequence
  Chr1p_12 Reverse Primer
acaaaaggagtggcctctga

SEQ ID NO: 28338 - DNA, 20 bp, Artificial Sequence
  Chr1p_12 Reverse Primer
aggaagtctgaagaccgcag

SEQ ID NO: 28339 - DNA, 20 bp, Artificial Sequence
  Chr1p_12 Reverse Primer
atcatgaaggcttgctgctt

SEQ ID NO: 28340 - DNA, 20 bp, Artificial Sequence
  Chr1p_12 Reverse Primer
agaacacttgggctgcatct

SEQ ID NO: 28341 - DNA, 20 bp, Artificial Sequence
  Chr1p_12 Reverse Primer
gtcagcccaggaatcaagaa

SEQ ID NO: 28342 - DNA, 20 bp, Artificial Sequence
  Chr1p_12 Reverse Primer
ttctgagcactgaatgtggc

SEQ ID NO: 28343 - DNA, 25 bp, Artificial Sequence
  Chr1p_12 Reverse Primer
ttgtccatagtttcatgattaacaa

SEQ ID NO: 28344 - DNA, 20 bp, Artificial Sequence
  Chr1p_12 Reverse Primer
tcccccactccactactctc

SEQ ID NO: 28345 - DNA, 20 bp, Artificial Sequence
  Chr1p_12 Reverse Primer
ccaactccatgatgaaccct

SEQ ID NO: 28346 - DNA, 20 bp, Artificial Sequence
  Chr1p_12 Reverse Primer
gtgcgccatctatcttgaca

SEQ ID NO: 28347 - DNA, 20 bp, Artificial Sequence
  Chr1p_12 Reverse Primer
caagagggtcaccactcaca

SEQ ID NO: 28348 - DNA, 22 bp, Artificial Sequence
  Chr1p_12 Reverse Primer
aaaagtccccagagaagtttcc

SEQ ID NO: 28349 - DNA, 20 bp, Artificial Sequence
  Chr1p_12 Reverse Primer
aaggagcaatggggactctt

SEQ ID NO: 28350 - DNA, 21 bp, Artificial Sequence
  Chr1p_12 Reverse Primer
tcctcataaaatgaaatgcgt

SEQ ID NO: 28351 - DNA, 21 bp, Artificial Sequence
  Chr1p_12 Reverse Primer
tcgtcacttctctggaggaaa

SEQ ID NO: 28352 - DNA, 20 bp, Artificial Sequence
  Chr1p_12 Reverse Primer
actaggggtgggtgctcaat

SEQ ID NO: 28353 - DNA, 20 bp, Artificial Sequence
  Chr1p_12 Reverse Primer
tgcttatctttacccacgcc

SEQ ID NO: 28354 - DNA, 20 bp, Artificial Sequence
  Chr1p_12 Reverse Primer
atcttgctggctcacctgtc

SEQ ID NO: 28355 - DNA, 20 bp, Artificial Sequence
  Chr1p_12 Reverse Primer
gaggacatctgtttggggaa

SEQ ID NO: 28356 - DNA, 20 bp, Artificial Sequence
  Chr1p_12 Reverse Primer
agctggcagaaagattgcat

SEQ ID NO: 28357 - DNA, 20 bp, Artificial Sequence
  Chr1p_12 Reverse Primer
tgttgcacacgttcttttcc

SEQ ID NO: 28358 - DNA, 20 bp, Artificial Sequence
  Chr1p_12 Reverse Primer
cgccattgttgttactgctg

SEQ ID NO: 28359 - DNA, 20 bp, Artificial Sequence
  Chr1p_12 Reverse Primer
tgccctttttaatgtctggg

SEQ ID NO: 28360 - DNA, 20 bp, Artificial Sequence
  Chr1p_12 Reverse Primer
tcacagaaaagaaaccccca

SEQ ID NO: 28361 - DNA, 20 bp, Artificial Sequence
  Chr1p_12 Reverse Primer
caaatggtttagaaggggca

SEQ ID NO: 28362 - DNA, 20 bp, Artificial Sequence
  Chr1p_12 Reverse Primer
acagtgtggtcccagaggag

SEQ ID NO: 28363 - DNA, 20 bp, Artificial Sequence
  Chr1p_12 Reverse Primer
gcaagttatttaaccccgca

SEQ ID NO: 28364 - DNA, 20 bp, Artificial Sequence
  Chr1p_12 Reverse Primer
cctagctcagagcagttgcc

SEQ ID NO: 28365 - DNA, 20 bp, Artificial Sequence
  Chr1p_12 Reverse Primer
gctgccagcctctcagatta

SEQ ID NO: 28366 - DNA, 20 bp, Artificial Sequence
  Chr1p_12 Reverse Primer
tgagcaagctgattttgtgc

SEQ ID NO: 28367 - DNA, 20 bp, Artificial Sequence
  Chr1p_12 Reverse Primer
gacagaggctccagatcagc

SEQ ID NO: 28368 - DNA, 20 bp, Artificial Sequence
  Chr1p_12 Reverse Primer
gacctcctgacacactcggt

SEQ ID NO: 28369 - DNA, 20 bp, Artificial Sequence
  Chr1p_12 Reverse Primer
gttttctttctcggcagcag

SEQ ID NO: 28370 - DNA, 20 bp, Artificial Sequence
  Chr1p_12 Reverse Primer
gaggagctttgcacatgaca

SEQ ID NO: 28371 - DNA, 20 bp, Artificial Sequence
  Chr1p_12 Reverse Primer
ccaggacattgccctactgt

SEQ ID NO: 28372 - DNA, 20 bp, Artificial Sequence
  Chr1p_12 Reverse Primer
ttggactgtttttgtgtggc

SEQ ID NO: 28373 - DNA, 20 bp, Artificial Sequence
  Chr1p_12 Reverse Primer
ggaagacatttcagcaggga

SEQ ID NO: 28374 - DNA, 20 bp, Artificial Sequence
  Chr1p_12 Reverse Primer
gggacaaagctctgccacta

SEQ ID NO: 28375 - DNA, 20 bp, Artificial Sequence
  Chr1p_12 Reverse Primer
aaaatcctcacccccaaatc

SEQ ID NO: 28376 - DNA, 20 bp, Artificial Sequence
  Chr1p_12 Reverse Primer
tggggtgcacatcaataaaa

SEQ ID NO: 28377 - DNA, 20 bp, Artificial Sequence
  Chr1p_12 Reverse Primer
cttcatgctttggggagaag

SEQ ID NO: 28378 - DNA, 21 bp, Artificial Sequence
  Chr1p_12 Reverse Primer
tgagggaatgaaatggttgtt

SEQ ID NO: 28379 - DNA, 20 bp, Artificial Sequence
  Chr1p_12 Reverse Primer
gggcaagatcagtggtcagt

SEQ ID NO: 28380 - DNA, 20 bp, Artificial Sequence
  Chr1p_12 Reverse Primer
cccactagcatgggttgact

SEQ ID NO: 28381 - DNA, 20 bp, Artificial Sequence
  Chr1p_12 Reverse Primer
ccaagtgctgtgctaactgc

SEQ ID NO: 28382 - DNA, 20 bp, Artificial Sequence
  Chr1p_12 Reverse Primer
tggaacagggatagagcacc

SEQ ID NO: 28383 - DNA, 18 bp, Artificial Sequence
  Chr1p_12 Reverse Primer
agcaactgaggtggcctg

SEQ ID NO: 28384 - DNA, 20 bp, Artificial Sequence
  Chr1p_12 Reverse Primer
atgtgcagttgttttggctg
